United States Patent Application Publication US 2020/0237834 A1 - sequence listing, part 2

SEQ ID NO: 3 - DNA, 3127431 bp, Enterococcus gallinarum (residues 1,563,717-3,127,431 of 3,127,431)
  Enterococcus gallinarum strain MRX518
tttgtccgcacgataagaccattgccactctttatcgtaatccgtatccacacgtaaattgtaagttgccactttcatttcttcatatcctttttaacaatttttggatctgttgcatttcttttcgaatctgtttggcttcaccgccgccatgccctttgtttaaatacacagttaattgttttggggttgagattcgatgataactgacaaaaaaatcggtcattgggcagataggatcctggctccctactgaagcaaagacagggccagtgatttttgctgccagatttttcaaatcatagtaggccatttggtaatagatggtctccttgctatctggaaaggtatcgatatattcttgcatcacatgatagctcccagttctgctttcgatgcggtgagaaatattcgagtgactaggaacatctgcaaaagtcgcaaagattggcgtttcagccagcgcattgacaattaatgcaatcccgccgccttgtgacccgcctcttaaaatcactcgttcagaatcaatctccggcagctctgctgcgacctctagcaggcgaagactatctgcaatcatgcgtttcatataaaaatcttctttttttaaaattcctcgaccaaacggtgcctcatgttgcgtcgtttcataaggatgtgtatctttcgtacggccgccttgcccgcgattatcgatcaccaagcaggcacaatcaatcaatgcccagtgggcaaactgaaagggttcctgtaggtgattcatataacctaaataatcgatgacgattggaagttggctcttatttttcggaactaaaagatagccgtaaatcgtttcattgtataaactttggaaattgacctgatagacatcgattcctgtcagcaatgctggttgttgctttcgttcaaacgctaatggaatctgtttgatttcttgtttgacttgtcgccaaaaacggtcgatttcctcctgagatggttcatttctaattgatttcattgacgtcaccctcttttgcccacaccttatgaaagaacagtacttgcagataagcgaatcctgaaatacctaaacatacgaataagaaagaattgatcttattcagcaatagaaatacgaatactggaatcactagcaagataatcgcatttgcggtactgctcaacaccgcataggcagtttcgtgtgcggtttgtttgactgtggaagaaaacaaacaaaacagtaggacaaacaccgtcaagaataaaccagctaaactgctgagtatcactgccaacaccccaagataagtggtgattcccatcaatccataaatgatcgccgcggtgacagcaacataccccacgatgatcccttcaagtacgattccacgtttgatatttgctagaaaagctcgactataccgttgccaaactggaacatctttttcttggtaaagctgatcgatggtttgatacaaggcgatcaaggctggtcctgtcagtacaatcgtgaccgcaggaacaaggaacaaaaaacttaataggatcatatccgcggcaaaggaaaagacacgatagtaccatccttcataagagaaaatttgtttcatctccactcacctgctccctttctagtttcaatcctactgatttcttgttgttttcttactcatctcttgtttattatccttttgctaaagtagtaaaaagatccttttacatatacttttgttggtacttttctacatctgctcgtctacactgcgcttcgcctacagttgcttctaggctggcgccaagaagaacttgcatgccttgctttgcaagccaatcgcagtgtttcaaagcaaaaagaggaaaggtcgttgggtctcgctttcctcttttcatcctttctataactgattatttaagtttttcgcggttttctgccattttttcagatttgacttctttgattgcatcccaattgttggaatctaaaaaactttcaaaatcagacagtgttgaatcaaacgttttttcatcttttgaacgaatcaaggagatgactgtgctatttagttttgttttgatcgaattattggaacgagcttctgcagtcccagcatctggatctgtgttctcaataacaaagtgcggataaagttttccttcaccccattcttgcatttgggttaatgcgctctctgtttctactttcaatgcattgacacggtcattgttgaagtagttgaagcgactgataccatatttcttgttgtacccttcgttatctgttttctccatttcttttacttcaggtaagtaatcgattttgccttcgtcattgtattcataagtgacgccttcaacaccgaatttcgtcaagatttgtcctggttcatcgatcaagtaagtgaatagttgagtgacttttgctggatcgactgcatcttttgtgatgtagttgatcaaccagcctgagataccggtttgattcaatgttggtttccggcctgatgtgctggctggtccatcaatagcaatatagcgagtatcagaattcttcataaattcagtaaagttgccgccttgaccactagttcctgcaacaagcatcgttgcatatttcccttgttttactttttcatcataggtcggaccgtcatctgtaaagctgtcatcactgatgttgccttcacggtatactttgttgaatgttttcaaccaattgatatattcttcatctaagttgcggtcatagtaattaccagattcatcttctaatggaacacctaagaagtcttgtaatttatctaagaaaggacctgctgtgtcaccgacagtcgtgaagcccattggggttagatcaggatatttctctttgatttgatccattactttgacaaaattttctggtttagaaatgtctggtttgccaagtgcttcatagacatcttcacgaatgacgaagttatcatttaccggaatattgccgctttcataatcggctgctgtattcgaatagtttggatagccatatgttttgccatcgtctaatgcaaaccaattgaaggtatcttctgttacgacattcaataggtaaggatcatattttttcgctagatcattcaatgagtaagcccagctatctgctttagtggctgcttgactggttttgtccatcaatgtcacgatgtctggcatatcgccacttgaaataagtgcattcaacttcgagtcgtctccggaaataaattcgatatcgatatttaaatctttcttgatctgtgcggtggtaacatcttccccaaaaggtaatgccgtccagtctgagttgatgtaccaagtgattttagttggttcttttttggtatcaagtttccatgctggtgttttctcatcaagctcataacgatctttgatcgaaaaatctgagctgctagcgtcatccgagctgccgccacatgctgctaagctaagtaatgctgttgctgccaataaactgcctaatacttttttcatactgatccctctttctattcttttaccgcaccggccatcataccgccgatgaagtgtttttgaagtaatggatagataatcaaaattggtacagtcgtaataacgatagtagccaattgcaccccgcgggtcgttgcctgcacgacaaagtcggtactaccgctttcggtcatcgtgcttaagttggactgcacaatgatttcatagatcttcatttgcagcggatagagatattctttggtgatgtacaattttgtggtcataaagtcgttccattgtccgacaccattgaacaatatgatggtagctaatgctggtttcgttaatggtaggaaaatcttgtaaaaaatttgaaattcgctggccccatcgattttcgccgattcttccaaagaaggaggaatctcacggaaaaagttcatcaagataacgacgtcataatagctgaataacgctggaatgatatagacccaaaatgaatctagtaaccctaacgatttgatcagcaaataggttgggatcatccccccgccgaagtacatcgtaatgactcctagcgtggtgtagatattccggccgatcagccgtgatttactgagtccgtatgccacaacggcacaaaacagtgtatgtgtcactgccccgatcaatgttttcagtacagagatcaaaaatgcccgtgggatactgtcatcggaaaatactttccggtaattctcccaagtaaatccccgcggccataaaacgagaccgttttcagccaaccctgaactagaagataccgatgagactaagatattccagattggaataatgatcagcagcgaaaacagaacgaggatcactgtgttaaagaaataaaaccatttgttctcttgtgttcttctttttatcacttggtcacccctcctataagataactgaattgccattgttcaatttgcgtgtcacacgatcggtgatgactagaagaatgacagaaatgattgctattcccaagccaaccgctgttgcatatgagaaatcgccttgtgtcagacccattttataaacgaatgagttgatgacttccgatttgttttggttttgtgaattcatcaaaaccaatgtctggtctaaattagatcctaagatgccgctcacatttaggatcagattcaatgaaatgatcggcgtcaaaagtggtaatgtgattgtccgaatctgcgtcaacttggtggcgccatcgattctggccgcttcataaaaagttggatcgatacgagacattcctgcaagatataaaatcgttccccatcctacttctttccaaaggtcagataaaacagcgatccaccaatatttattaggatccaacaaatgattgacacctttatccatcattcctaaagacatcaggacttggttgataaacccattggtcgacaaccatgaaatcatcataccgcctaggacaatccaagaaaaaaagtgagggatatacgaaacggtttgaataaatttcttcaattttccgtcccgcatctcaaaaatcataatggcgagaataattggaatcgcaaagcctaagcctaacttcatcatactgattgctaacgtattcccaactgcttcccagaaaaaactgtcgtgtaaaataattcggaaattctctaaccctacccatggtgcagaggaaatcgtatcaatgaccgtataattcttaaaagcaataatgattccataaattggaatataattaaatacgatcatgaatgccacgcctggtagtaccatccaatgcagttgccgctgccggtatatctctttcagcttactcatacgcaaaaaccctttctgttatcgtctcaacgctcatcctatctttttctttttagtgaaacgtttctacgagttgattataaatcgcgctagaaagaaatgcaagcctttacatcattaaagttttatcatttttcattatctcatttttaatgacttacatatcctttaaagatatttttcacaaacaaaaacctttaataacaaggttatccgctacaccagatcacttatttttgtttttctacagctcttgcaactgtttattgcgttgtttcttttctcgaagcaactaattttagaacatgaacgatagaaaaacgtttcactaaaccataaaaaaaagagctttacagctcttcaaaatgattttcatagccaaaatgggtataagcaagtgtggtagcgatccgtccacgtggtgttcgtttcaaaaaccctctctgaatcaagtaaggctcatacatatcttccacggtctctgtttcttcaccgatgtttacagataatgtgctgaggcccacaggccctccaccatacaactcgatcatcgttcgaatcagcttctgatccacataatctaaaccagcatgatcgacttgcaaaagcagcaaagctttatctgcgatttggcggtcaatgattccattcgcttgcacttgcgcgaagtctcgaacacgtttcagcaagcggttagcgatccgtggcgttcctcgagatcgtcgagcaatctcaaatgccccttcttccacgatctccgtctgaaaaatatccgctgaacgtaagacgatttcttttaagtcttggtcttcataatattccatatgagaaatgatcccaaatcgatcccgtaatggtgcagaaagcatccctgccctagtcgtagctcctactagggtgaatggcggcaacgggaaatggaccggatgcgcagttgttccttggccaaccatgatgtccacgaagaaatcttccattgcagaatagagcatttcttcggcaactcgcggcaaacgatggatctcatcaataaacaagacatcccccggctgcaattcattcaaaatcgcaatcaagtctcccggcttttcgatagcaggtccactagtcgtcttgatgttgaccgccatttcattggcgatgaccatcgccattgtcgtctttcctaatccaggtggtccgtaaagcagcacatgatccaatgcttcttcccgatttttggctgcttgaatgtagatcgacaactcttcttttactttattttgaccgatatattgcgcgagaaactgcggacgcaatgatttttcgatcaattcttctgtttcattcgtttccggtgaaacaatccgttcatccgtcacctaactcgctccttattttttcatcatcaattttaatgcttctcgtaagtattcatctgttgatttagtcgtattaggcgctaaatatttctcagctttcttgatttctttttcactatagcctaatgctttcaaagctgccatcgcttcgtccaacgcggtattcgccacagtgactggtgccgttggctcttcaccgactaattctgcgacttttccttttaagtccaatatcatttgctgtgctgtttttttgccaacacctgggaatttggttaaataagtgacatctccgttttcgacagccgtgatcaatcccgcatggtcttcattcgccataattgccaatgcacttttaggaccgatcccagagacgctgatcagttttaaaaataattgctttccttctaatgtagaaaacccgtataaactatgggcatcttctctaattacttgatgcagataaatcttcacttcttgattcagcttgccgctgaacgcatacggattgccgaatgccacttgataaccgataccgtgcgtttcaacaacgatatacgccggaaagatatccgtgacttttccaataatatattcgtacataaccgttcctttctatacatctagctgtacatacgttccctttattgtagcatagactgaaagacaaaaaaagaagcaagcgaagcttgctcctttactcaacaagagaagtatattctccatatccttgctcagccatttcttccaatgggacgaatcgcaaggctgcggaattgatgcagtagcgcaacccgcctttgtcttgcgggccgtctgaaaaaacatgtcctaaatgggaatctgcttctttactgcggacttcgacacggtgcatgccatgagagaaatctgctttctctttgatttctttgcggtcgatgggcttcgaaaaagaaggccatccacaaccagcatcatacttatctgtcgaagcgaatagcggttcgccgctgacgatatccacatagatccctttttcataaaaatcatcataagtccctgtaaaaggacgttcggtcgcattttcttgtgtgaccgcatattcgatcggtgacaatttcgctatcaaatcttcttttgattctgacatttttctcacctactttcttctcttatcttgccttttttccaatcgtttgtaaacgaacttgcttctttacttaagaagagggcagttctggccacattctggttctttcagcaaaatgataaaacggcggctggtctttcgtatagatttcttctgtgaaaactgcttctgtcaattcttgaaacaaaccagtggcaaagaagaattctgccgtctcctgtgcataataaaataagctagagccacactggcggcaaaatcatctttgcgcccaattagaagagttataccgttgaatcaaggattcgccagtaaatgtgatttgatcacgggaacaagcggccagcgctaaaaaaggaccaccatgaaatttctgacacattgagcaatgacaagcagtcacttggggatgaacctccgttagctcaatcgtaacttgaccacaaagacacctgccggatagattcatttttccagctcctccggaaattcttttaataacttggcaaccgtattaacagggaagccaacgatcgtataaaaatccccttggatcgcttcaacaaacacttttgctgctccttggatcccatagcccccggctttgtcttgatattccccagttttcagatactcggtaatcatttgctccgtcaacagactaaaggatacttgtgcagaaaccaatttttctcgtcgtttttcttgtttttgtaaaacgaccgcagtatggacccaatgagtctttccactcatcttctgcaacatccgtctggcatctgcttcatcagcaggtttgccgaaaatctcctggcccaccactacggtagtgtcactggcgatcacaagatctgtgggaaagcaggctgtgacagttgctgccttttcccgcgccattcgctgcacatactcctctggtgcctctccaaataccacagactcatcgatatctgccggctgtatctgaaaagatgggaccaattccgctaataattcttttcgccgtggcgattgagaagctaagacaatcattccattccactccttgcacgatgcggatcttggatccgtttaaacattcgctccatatcactattggtaaaatgaatcaataccggacgtccatgaggacaattgaagggattctcacactttgcaagatccgccaacaggattcgtgcttgcgcctcatttagataatgattggctttgatcgaacgtttgcagctcatcatgatcgctgttgcttccctgaatttcttgacgctgactgaacctgtctctaaaagcatgtcgatcatttctcgaatgatgctttcttcttctcctgctgggtaccaagtgggatgcgcccttacaataaagctgttcgccccaaactcctccaaatggatcccaacttcttgtaattttttagtttgttccttcaacttgatcgcatcattattgggataatctaagacgatcggtaccaataattcttgcagatcgtcgctcacttctccgattttttcccgaaaatattcatatttgatccgttcttgggccgcatgctggtccacgatataaagtccttcgtcgctttgagcaaacaggtacgtcccatgcatctgtccgaaatattctaaatgagggaaacgttgcttggcaggcgtttcttctaacaaacgatccacatatttcgtatagtttttctgtccggcatgcagttcaggatgcagccgttcttgcgcctgctcttcgattaacgacaagtcctgctgactagcatcctcgagaacagacgctgctggttgatcaacttcttggacaatctctgtcacaggtcctgtcgcagcaaagggatctcgcaacgttttattgggcagtgtttcttccagactatcgaaaactgcttgattttccacagaatatgccgaagactccggagccttttccctttgctccgcgctttctggaagttttccaccttcctccacagggttttccacaaagttacccacagtctgttgataacctgatgacgccacttgaaactttcctgtctcgcggttgaaagttaatcccgaagaagtcgtaggactcgttcccagatccagtttcgtttgttccacaggttcagtggtcacttttttcttaaaacgaagattatcggcagcattcggaatcaaattctcttctcgcaaactgtcattgatcgatttactgatcaatttggtcagttcttcttcttttgataaacgtacttcttgtttagtggggtgaacattgacatcgactaataatgggtccatcgtgatctccaggaccgcaatcgggaatcgtcccaccatcaattttgagccatatccagcgacgattgctttattcaaggcaaaattccgaatgtatcgtccattgatgatcgtggatagataattacggctagcccgggtcacttcaggcaacgagacataaccagtcagcttaaaatcaagatcttcactattgatagctaacatttttttagcagtctcaacaccatagatcccggcgatggtttgtttcaaatccccgctaccagtagtagtcagcattttattgccttcatggaccaagcgaaaagcaacttccgggtgactcaatgcaatacggttcacgatatcgccgatattggccaattctgtctgcaatgttttgacatatttcaagcgcgctggcgtattataaaaaaggttttctacagtgatcttcgttccttgccgcaagttcgctggtatatgttcttccacagtgcctcccttcaaccgaaggaatgagccttgagaagcatctttgacagctgtttcgattgttaaaatcgagactgaggcaatacttggcaatgcctcaccgcgaaagccaagtgtccgtatccgaaacaagtcatcgcggttatggatcttgctggtggcatggcgcttgaaggccgtaacgacatcttcttcggcaatcccctcgccattatcgatcacctggattttgcgtagaccggcttcttcaatgaagatatcgatctgtgtgctgccggcatccactgcattttccacaagttctttgacaacagaggctggccgttccacgacttcaccggcagcgatttgattcgctagacgttcagataattcttggatcttgcccatctgttttccttctttctagattcgtttttgcaattcataaagcttatttaacgcatccattggggtcatttctaagagattcagttttttcaactgatcgatgacgccaacttcttctgtggacacctcgctaaacaatgaaagctgttgtgtttcttctatcacaggcttttcgatcgttggttcatgttcttccagagctttcaagatcgttgccgcccgttgtagtaatccgctaggcagtcctgcaatttttgccacatggattccgtagctcttgtctgccggaccttccatcattttatgcaggaagacaacttcaccgtctttttctaccgctcctacatgaatgttccgcaaacgcagtaattcttcgtccaatatggtcagttcgtgataatgggtcgaaaaaagggtcttcgctttgacttctttatggatatattcaatgatggcttgagcaagtgccatcccatcataggtggctgttccacgccctaattcatcgaataggatcaaactgtttggtgtggcatgacgcaacgcctgattggcttccatcatctcgaccatgaatgtactttgtccagcaatcaagtcatcgctggcaccgattcgggtaaagatgcggtcaaaaatcggcatttctgctgattgcgcaggaacaaaacaaccgatttgagccataatcactaacagtgccaattgccgcatatacgtactcttaccagacatattcggtccggtgatcagtaaaatatcggtgtcttcatgcatcacgatgctattaggaatatattcttggtgccccagcactttttccacaacgggatgacgcccatcgacgatattcaaggatcgctcttttttcaaaactggccgtacatattgatagcgttcagcaattgtcgcaaaactttgtaacacatcgactgcactaatggctttggctaatttctgcaagcgaaggatactttttttcacttcttctcgtacttccaagaacaattggtattccagatccaccgatttttcttccgcttctaaaatcactgtttccagcttctttaattcaggtgaaataaaacgctccgcattagcaagggtctgttttcgttcataacggccttcttcgagaccagccagattggctttggtgatttcgatgtaataaccaaaaacacggttgaagcccacttttaaattcttgatgcctgtttcttggcgttctttggcttctaactcagctagccactgcttgccgttgcgcatcgcttcccgatacttgtctagttgttcgtgaaagccatctttgatgacatttccttcagtgatctgcagcggtgcgtcttcatcgatggcgctatcgatcaatgccactaactcatccagtggctccaattcgatcaacaggtcattccactctccacgattgatgcctttgatcaactgggcgatcagaggaacttgctgcaaagaagatttcagctgcagaagatcccgtccattgacattgccaaagacaactcgcccaactaagcgctccatgtcatatacttttgtcagtgcgtcttgtaagtctgctcgttcaaaaaagctgtccaacaatgattgaaccatttcttgacgtgcaaagatcttctttggttggatcaaaggacgatccaaccactgcttcaataaacgggcacccattgctgttttggtttcatctaataaccataagagtgttccatgcttttggccagttcgaatggatcgactcaattcgagattgaactttgagtaatagtccattttcaaagaatgatctggttgatattctactgcttgctggatatgagccaagctgcgtttttgggtgattgcgagataactcaataatttgccagtgaccgtcttttcatcttcaggcaatccgctagtcaaaaaacggaattcagcattttcttcatatgtctcttgttttgaaaaaacaacactcaagcgagtggtcaacagttctttaagggagtcaggaacttcgctgcacaaaacgacttccttggtttgtaaggcagcggcctcattcaataccgcatcctcgtcttctaaaagcgcggtctttaactcaccggtactcaagtctgcataagcaaaactgtaaccttgcgtcgttttcatcacagccgtcaagaagttattatctttggcggacagccctttgctatccatcactgtccctggagtgatcaattgaacgacttcccgtttgaccattcctttggtggttttgggatcttcgacttgttcacagatggcgactttatagccttgttcgatcaacgtatcaatgtaattactggcggcatgataagggactccgcacattgggatcggttcttccgcatttttgttgcggcttgtcaatgtcagctccaagatttgtgcagctttgatcgcatcttcattgaacagttcatagaaatctcccagacgatagaacaaaaaagcatcttggtattgtgccttgatgcttaaatattgttccatcataggagtgtttttagttttttgaggcatgagcatcttcctcctcgatggctttattcacttgcttttggatttctgttgtgacgtagtgcagcaattcatctgcttcctgaagtgccgcacgataggcgatcacgagtggatgctggtcatattgttgggtcaactcagccactcgtcgcaaagcatccttttttgcttccggtttatcataatgttcatactgaacgatttctttttgggtttgcttgattgcttcttctaactccagcagtttttgattcttttgcgcccgttgttgaatcctttgaaactcttgtactaccgggtgttgtgccaataattgccgcaacgcagccaattcttgtgctactgctgtttctttttctaatgggtccatgattctcctattctgtaaaaggccggtcttcgctgatttggattggacgaatcgatttggcttttccagtttgttcatcgatctcgatcagacaagcggacaaaatactgcgtccgttctcgatcacttcaaatcgttgcggcaatgccgtcaagaatttttcgatgataggttctcgtttcatccctaaaatcccatcataaggaccagtcattcctacatctgacaaataagccgttccttgtggcaaaattcgggcatcattggtttgtacgtgggtgtgtgtgccgacgactgcagaaactcgtccgtctagataccagcccatggcttgtttctcactcgttgtctcaccatgaaaatcaacaaagataaatggtgtacgcttgcgggcgatagtcaccaactcatccattttacgaaaagggtcatcaatgtcgaccatgaaagagcgtgcttgcatattgatgactgctaattcgatcgcattgactttcacaaagaccattcctgtaccaggagtcccttctggaaaatttgccggacgaatcattttttttgcatcaccaataaattcaaaaatatctcgattatcccatgtatgatttcctagtgtgatcacatcgacgccatcttgaagaaatttcttataaattttccccgtgatcccccgacccgcagctgcattctcgccatttgcgatcgtcacttgcggccgataggctttcttcaattttggtaaatactctgtcaaggtatttctccctaacgatccaaccacatctccaataaataatacccgcacactttttcctcttctcttttaacatctttctttattataagtgtttttcttgagaaaaaaaagagctattccataacagcaaacaaccttaaactacaggaattccttcctaccgactgctcttgttgctcttctaggaccctttagaaaataaaacactctccaaataacgttggtcgtttggagagtcatcattattcagcaacacgtttcacgatcgcaacgattaagtcccgcgcctttgccatcgcttcaacagtgataaattcatattgaccgtggaaattctcgccgccggtaaatagattaggggttgggatccctttgtaagtgattttggacccatctgtgccgccgcgaaaaggggcttcgatcggtgtgatccctaagtctttcattgcttgacgagcaatgataacactttgaggattttctttgattcggtcgcccatattgtagtattgatcatacagctgataggtgatccgctcaccatagtactcattcaacttttcaatgatctgcaccatcttctccttgcgcttttggaaaagcgtttgatcgtgatcacgaatgatgtaggagagttctgcttgcccgatatgtccagaaagattgtgaagtaagtaaaagccttgatagtcttttgttttttccgggacttctgcttgcggcagtgccgcatcgatctggttggcgatctttaatgcattgacgagacgaccataagccgtcccaggatggacgcttgttccgttgatttggatatcgatccgcgcagcattaaaggtttcatactccatatgtcccacacgaccactgtccattgtataagcaaaagccactgggaaatcggctgggtcaaacagatccgcccctttcccaatttcttcatccggaccaaaagcgatccagacatctccccgttcttgtggatcaatcgtttgtaaaatccgcaatgcatcgatgatctcagcaatcccggctttatcgtctgcacctaggagcgtcgttccatctgtagtgatcaacgtctcacctatgtagtctttgaggttaggaaactcagcgactgtcatcatgatccccaacggctcattgaggcaaacgtctttgccatcataattttcatggatctggggttggatgttttcggctgcaaaatcagcggtgtctacatgtgcgataaatccgacagccgttttgtccggatttcctgcaagacgtccgatcacaaagctattcttttcatggtacaacacatcgttaagccccatagactgcaattgatcccgtaataaaagtgccagctcaacttgtccaggggtagtaggaattgtttggctgcttgcatcggaacgggtattgattttggcataacgcaaaaaatcggcgatcattggtttgtccttcactttcgtcacttccttcaaaaagataatggtcgatggtccgtttcatggatgatctgtcggaaatctgcaaatcctgcatctaatcctcggagcagcatttctgctgtaccgatattcgtagccaacgggatttcataaacatctgacagacggatcaatgcggtcacatccggctcatgtggttgcgctgccaatggatcgcgcaaaaaaatcaccatatccaacgcatcctccgaaatcatcgccccaatttgttgatcgcctcctaaaggaccagacttatagcgatgaacggatagtcccgtagcttcttggattcgttttcctgttgttcctgtggcatataattgatgctgtgccaagatttcgcgataagcggtgaccatcttcaccatcaattcttttttgcggtcatgggctatcaatgctattttcatcttcactcctcctcttttttccattgtaccaatacttgctgaaaaaaagaaactgtgctcccaagaataagacattgcctaatcttacacagagcttccatcatagaatcaaccggatcccttagtaaaataggtaggctgccaccttaagaaggggcaccgaaggaaatccttctggcaatttgcggggctgatttctctgatttggctgttgcaaaaaatttcaggtttgtctgtttcttaggacacagtttgtttaaatcaagtctagttctttcaatgcttgccagatgccatcctcatcattgctggcggtgactttatcagcaatcgcttgaatctcgggagccgcgttacccatggccacgccgacgccggcagcttgcagcatttcgcgatcattttggccatcgccaaaacaaatcacatctttttgtgagattcctagttggtgtgccaccgaaagaatcgtggctgcttttgaaccatcttttggcacgacatcgacactgttttcatgccagcgaacaaaacgtaatttactgtagcgatcgtcaaaatagtcttcatactctttcccataaaaagccaacgcttgatagacttctttttcttccggaaagtgcatgtctaattcaggcaattgtgcgccaaaagagcgcattgcttcatccatgatgccaatatttaaagaagaagctcgtttagccgtatccattcccacaaatgcggtatcgatccctaactcgtttgcttcagcaacaaatgcttttagctgttcttcatctaataaatttttgtacacttgttggtgtgccaaaaatgcagcagcgccattgcataaaatataattatcaaaagcaagggagcggatgatgtctttcgcatggaaacgactgcggcctgtagcaactgtcacgaaatgcccagcatttcgcagcaactccaatgcttcaatcgtactttccaacggttgcttgttcgaatccagtaacgtgccatcaatatcaaaagcaaagaatttccgattcatatccataaaaaactaagactctctttctgtaagaaataacaagaatttttacttttggatcatgttctctccaaaaagcataccctattcttaacataaaaagctgtctatttcaataagtggcggatcttggtgaatgactcttgcttaccaatgaaggtggctcattttttggggaaactgaaatattttcaaccacatgaagtgtttgcctcaatcgtctttgtctatttggcagtgactggttgagtgccccagacttcatctgccacttcaatgatcagctgcaatttcttccattgatcttcttctgacagaatgttgccctcctctgttgaagcaaagccacactgcggactcaagctcaaacgctctaagggcacgtattggctggcttctttgatccgggcaatcaagctttctttctcttccagagccccatttttacttgtgactagaccgagaacaactttctttgtttctgggacaaatcgcaatggctggaagtccccagagcgatcatcatcaaactccaagaaaaaggcttcgaccgcttcatgtcccaacagcgaatccgcaactggctcatagcctcccgatgccgcccatgtcgaatggtaattgccacggcaaacatgggtagtcacgtgcaggtcgttaggcagatccaccaatgcactgttattcaaccgcagatacaattcttgtaatttttgtgtatcatactcatcgttggtccttgactgccagtaatttttgtccaccagcatcccccacgtacagtcatccaattttagatgacgacagccaagatcatacaaggctaaaatggtttcacgataggcttgcgcaatatcagcaagcaatacttcccgatccggatagatagcgttcactttttcttcgttgctgcctcgaacaagttcgacaaacaattgagcaggcgctgggatactctggcgaacaggcaccccatctgcttgagccgcgacaaagcgatattcctcaaacacgggatgttctggattgaatgcgactttcccagctaatcgtgcagaatcagcacgggtttcttccccatggaacaagtagccttgatccatcaaaatatgctctattccttgaaatccccagaaaaaatccaagtgccaataactacggcgaaattcgccatcgctgacatatttcaagccaacttctttttgttttgcgactaactcactgatcgcctgatcctcaacttcttttaactcggatcgagtgatttttccttcagcgaacgcttcccttgcttgcttcaacttctccggacgcaaaaaacttcctacaatttcataatgattgatcacttggcacatagtttctcctccttttttgggtaaaaaaaaatccttaagagttatctcttaaggatgtaataaatttacatggtaccaccttagtttgcatccgacttacgaagaatgcctctactccaatgcgacgctgttgcgtgatattggggtctcagtaacggggacatccgtgcgcttctaaaacttgcgttctcgaaacacccactcaaaagccattttcagattcgttttctttcaccctttttcagctgtcggggctctctgttagaaattccacagaatcttactttctttttctacgtgtttacttattgatttttaacaaggatagcagaatgattttagtgtgtcaatattgattttaaaaaaaagaagcattgctgcttctttcttcgtttaatccacataagttgattttgattgattgagccatgcatagcccagacccatgatcaagccgccaccgatatagttcccgataaaggcaaagacaagattgtgaatcacgctgccgacagtcataccagctaagtggccgccagatgcccagaaagctaacgtaaacgctgggaagttagcgatgacgtgttcatagcctaagaaggcaaagataaagataatgaaaataatcgcagctactttccctgcatcatctttcatccgcatacttactaaaacagctgtattaacgacaatgtttgcgaacattgcttcgacgacgatttggagtgtcggcttatcaagttttgcggtaatggaagtcaataagaaattatccgcaggcaacccttgaaaaggtccagtcaaagaaataattgatccaaaaatcaaaccaccgactaaattgaagagcacacaagtgaacaaaatcttcaatgccaaaggaacactcaatcgtttgcgataaacaccgacggtcatatacaacatatttgatgtgcctaattctgcgttcatatataagatcatgacaagggaccaactaaacataaatgcatacaacatttttcctagtccatgtgcaatgtcctcacctttcatagcaatcgcaaaggcaatcgctgttcctagcgtcaagaaaagacatgccatcatggcccgtacagcatagcgtaaataactgcttttgatcaaatcgaccttcttttcaatggaagaatcaattttttcaaataatggggatactggattcatttttctgctcctttttatgggtatgataattgagttcgttataaagtacacaataccttcacattttaataaccaaacgcctatttgtaaagtgttttctgaaaaacgttactttttatatgaaattttcatcacattttcattgcaattgaattcaatcataccttgacttttcctcttattttatcgtatactgttccttgtgtaaaataatgcagcagggaaataacagctcgtcaccagttcgttgcctaaaaggttcaattgcgtaaccgcggctgcaaaggtgaagattgaagaacgaactgcacggatgtgaatttttcaacggattattttactccaaactatatttattggaggaactaaattatgtctcgttatacaggaccatcatggaaaatttctcgtcgtttaggaatttctctttcagaaactggtaaagaattggcacgtcgtccttacgctccaggacaacacggaccaaacagccgtggcaaaaaatcagaatacggtatgcaattgactgaaaaacaaaaacttcgtcatatgtatggcatgaacgaacgtcaattccgtacattgtttatcaaagcaagcaaaatcaaagaaggtaaacacggtgttaacttcatgatcttgttagaacaacgtttggataacgtcgtttaccgtttaggtcttgcaactactcgtcgtcaagcacgtcaattagtaaaccatggccacattttagtagatggcaaacgtgtagatatcccttcttaccatgttgaagttggtcaagtgatcagcgttcgtgaaaaatcacaaaacatctcaacaatcaaagaagcaatcgaagcaactactggtcgtacagcatttgtaagctttgatgatgaaaaattagaaggttcattgactcgtttaccagaacgcgatgaattgactgcagaagttgacgaagcactagtcgttgaattctacaaccaaaaactataagaattttcaccagaagctgcgacagaaatcttgtcacagcttctttttttataaattgttagaaataacttcttcggaaagaagtcaaaatttcacagaaatccgacaagcaattttcgaactctccttttcatctctcttgaagcagactacttctgacatgacctcttttttgagaaatcaaaaaaactgtgctggtttcccgaaggaaataccacacagttcgcgattaatcggcaggtcgacttcaaataatattgacgacggactctccggatgaatttttttgatgatagttgaacaacagcaaatctttctgacgctttttaaagattactttccgaatattgcgtggcacaaatttgcggatatcatcttcattatatcctacttgcagtttgtcgccatcaacaatgatgggacgtttcaataaattcgggtattgctcaatcaacgctaataattcttctaatttcaagtcatccaaatcaatggctaatttttgatacacttttgaacgtgttgagataatatcttctgtcccgttttttgtcaaagaaagaatttccagtagttcatcactatttaatggatcgctaaaaatgtttctttctttgaagggtagttcattttcggtcaaccaagcccgcgctttgcgacatgatgtacagctaggcgttgtgtatagtgaaatcattgatcattcttcctttctgatttttctgcggattcttattgattatctgtgattttttcgatcgtttcttgtttgacgacatccacgatgcgaatgttgatttctttgacttctaaagcagtcaaccgactaacttcttgcaaaacaatttcttggatctgagcaaacaaccggggaatatccttcccgtaggcaacaataacttccaaatcaattgctacttgttctttgccaacttccacttcgatccccgatgtcacattgctctggtcggccaaatcttccgtcatacttgaaaaaaattttccatctgcactgattaagccatcaattgacgccaaggctacacctacgatcgtctgcaagactttctcctcaaaggtaagcgaagcagtctctacatttgccgcttgttcattttccatttttcacactccttgtttgcatttctgaaaaaagaacgttttttttagtaacagatccaccaaaaccaacaaccttttgcggttatctgccaccataggtaaaaataccctcctctattagcatagaagttttttgttttttttacaaagaaaaacacttgttaccggatactttttttgcaaattaccgaaataaggtacgtttttttaatataaaaaagcgattccagaaaatattttcctcgatcgcttcttatattttatctgatttatctaaaaagattcttcctcaatcctaccgctcattcaaccttgtatagctccggtcagaagacacttccttataagctggtcgcatgattttttgggcattgactaattcttcgattcgatgagcagaccagccgacgattcgcgcaatcgcaaacatcggtgtgtaaagttcttctggcaagtctaacattttataaacaaagccgctgaaaaaatcaatgttcgcactgacgcctttatacatttttcgtttttgagcaatcacttctggagcgattcgttcaacagttgtgtaaagttgatattcttgccaagcgccgatgcctttctcttgtgcgagtttggctacataatttttaaaaattgccgctcgaggatcattgtcactgtagacagcatgtcccataccatagatcaagcccttgcgatcaaaagcttctttatccaaaactgcttctaaataacgacgaactgcagcctcatctgttgtatcagcaatctggcgtttcagatcactcatcatctccgtcactttgatattggctccaccgtgtttaggcccttttagcgaccctaatgcggctgcgatcgtcgaataagtatcggtaccgctagaagtaactacccgagtagtaaaggtcgagttgtttccgcccccatgttccatatgaagcaccagcgccatatccaaggtttgagcttcttgaaaactataggctttattaggacgcagcatggtcaaaatcgtttctgccgtgcttaattcctccgaagggcgatgaatatacatacttccctcttgattgtagtgattataggcgtggtaagcgtagatcgccagcagtggaaagacactgatcagcatcaaactttgctctaatacattctcaatactgacatcatcggcttgcggatcataactggctaatgtcaaaatactgcgagataaactattcatgatatccgcagaaggtgctttcatgatcacgtcacgaacaaaattggttggaagcgtacgtttatccgccaataactgacgaaatccctgcaattcagataactttggcagctcgccaaaaagtaataaatatgcaatctcttcaaaaccaaaccgattttcttcaacgaatcctgcaaccaattcattgatatcgattcctcgataacgtaattccccacaagcctcgaggggcttccccgccacgattttttctggataaatggtagaaatggttgttaagccggctaagacgccttttccatctaaatctctcagtccacgttttacgtcatactctgaataaagattcatatcgatttgattgtgtttctgacacaatgatgaaagatatacgatattcttttctttttctaatttttccacagccatgttacctcctaacatccttacgtaaacatgctactaacttcatttgattcaaaaaataaaaacttttaaacattatagcacgatgtttataaaatgaaatatttttcataattttaattgatttttctttttataaacgtataattattcctaatagattgatatttaaggaggatgcttatgaattggcacacaaacctgatcgtgaatgatcagcgctatacgtttattgatttagcaaaggtcgcggctgactttaacgctgatttaaaaagattgccttactcgattcgcgtgttactagaaagtgtcgcccgtcaccaagatgaagagattactgctgtttacttggattatttggtcaattggaacgctgaacagcccacaggcgtcgtacctttcaaacccgaacgtgtcgttttgcaagacttcactggtgttccagcggtcgtagaccttgctgcgatgcgagacgccatcgttgccttaggtgggaatgcagatacgatcaatcctgagattcccgtgactttggttgtcgatcattccgtccaagtcgattgtgcagggactccggaagcagtggctttcaatacggcgcgtgaatttgaacgaaaccaagagcgctaccaattcttgaagtgggctcagggttcatttgacaattttgaagtcgtccctccagagaccggtatcatccatcaagtaaatattgaatcactttctgatgtgattttggaaaaaaaaatcgctggcgagtcgtttctttttccggatacattgcaaggaacagattcccatacaacgatgatcaatggtctcggtgtattgggctggggcgttggcggtatcgaggcagaagcagcgattttgggcgagccgtcatttttcccgactccagaagttatcggtgtctgttttgtgaacgaaatgcctgccggtacgaccgcaactgatttggcgttgactgttactgaagtcttgcgaaaggagcaagtggtaggaaaatttgttgaatatttcggaaccggttaccaacggttaagtttagctgaccgtgcgacccttgccaatatggcaccagaatatggcgccacttgcggtttttgtccaattgatgaagagaccctcaactatttagctactacgggacgaacacccgaattgatccataaggttgctgcctacacaaaagccaatcatctcttttatgatgcgacggagataccagactacaccaaaacgatcaccatcgatctagccaagatccagcccgcattggcaggaccaaaacgaccacaggaccgtatcttattaccggaagttggcactgatttcgatcgttccctcacggctgacatcggaccaaaaggcttcggtctttcggagaaggaatggcaaaaaagcagccaagttaactggccaaacgagccttccgaaacattgcagacaggagatatcgtacttgcagctatcactagctgtacgaatacgagcaatcccttcgtcatgctctctgcgggattgttagcaaaaaaggcggtagaaaaaggattgaccgtgccaaaatcggtcaagacttccttggcccctggttcccagatcgtaaccacctatttgactgccagtggattattgccttatcttgaacaattaggcttttatttagttggatacggctgtacgacttgtatcggcaactccggtccattagaagcacccgtagcagaagcaatcgaaaacgaaaatttactggtcgcttctgttttatctggaaaccgcaactttgaaggtcggatccatccacagatcaaagccaattatttagcttctcctccgttagtcgtcgcctatgccattgctggaaccatccggaaagatttgacgaaggagcctctaggcgtcgtagcaggacaagaaatttatctgacggatatctggccaagtaacgaagaagtcaatgaatatattcaagcttttgttggaccagaagcgtttcgtgcagcttatgcgcatctattcgacgccaatgagcgttggaaccgtatcgatacaactgccagtgattgttatgcttgggaggacacatcaacatatattgcccacccaccctattttgattccttgaccaaagaattacctatccaaacaagtttgtctgatttgaaagtgttagccaaattgggggattctgttacgacagaccatatttctcccgctggtagcattggattagattctcccgccggcaggtttttgcaaaccaaagctgttccttaccgtgagttcaactcttttggttcacggcgaggcaatcatcacatcatgatgcggggaactttcggcaacattcgtttacagaatcagctggttcctggaagtactggcgggatcacccattattttcctacaggggaaacgatgtcaatctatgacgctgccatgaattatcagaaaaacgaacagtcttgcattattttagctggtaaagattatgggatgggttcttcccgagattgggcagctaaagggacccaacttttaggcgtcaaagtagtcttggcagaaagtttcgaacggattcatcgcagcaatttggtcatgatgggtgtgattcctctagaatatcttgctgggcaaactgccgcttccttgggattggatggctctgaatccttctttatccaactgcccgaagaaccgcaggtcaatcagcagattgatgtgacagccaaacgtacagatgaaacaatgatcacctttccgactcggctgcgtttcgatgcaccagcagatatccgttactggaaacatcaaggaatcttaccaatggtcattcgcaaaaaaatagaagcaggaggaactagcaatgcattctgaagcgtccttatctaacactgttctcacaattccttatatcagtggtgacggcattggtccagaaatttggcaagcagcgcaacctgtgattgatgcggccgtaaaacaagcgtatggtcccaaaagaaggatccactggcaagaagttttagctggtgaaaaagcatttagacaaaccggcgaatggttgccgcagtcgactcttaccactatccaagaggctaaaatcgcattgaagggaccattgaccacaccagttggcaaaggattccgatccctcaatgtcacattgcgccaaacattagacctctatgcttgtgttcggcccgttcgatactttgccggggtaccttctcctttgaagcatccggaaaagacgaatatggtgattttccgtgaaaatacagaagatgtttatgcaggaatcgaatttgcaaaaaatgatcccctcacgaaacaattaattgaggtgctgcaaacacaattcagtgtcaaaaacattcgctttccagaaagcagcgccatcgggatcaaaccgatctcaaaagagggcagtcagcggttgatcagcggagcgatcgagtatgctatcgcacaccacttgccgtctgtcacccttgttcataaagggaacatcatgaaatttaccgaaggcggcttcaaaaattggggctatcaattagcggaaacgaattatgccgatcagtgcttcacgatgaaccaatgggcaacaattaaatctgagcagaatattgaagcggctcaagcagcacttgctgctgcacaacaagccggaaaagtcattatcaatgatgtgatcgcagataatttcctgcaacagattcttttgtacccagaaaaattttcagtgatcgcaacttgcaatctcaatggcgactatctttccgacgcattagccgctcaagtcggcggaattgggatcgctccaggtgcaaatatcaattatgtaagtggtgccgcaatctttgaagcaacccacggtactgcccccgatatcgttgacacaggaaaagccaatccctgctcgttgttgctctctgcttgtatgctcttggaatatatccagtgggatgaagcagcagttcttattaccacagccatcgagacagcaatcaaggaaaagaaagtcacaactgactttgcggcagctatgactgacgcgcattgtttgtctaccaaagcgttcggtgactatctggtcacattgatcactccataatcattcaccgctctcgttgacttgtcattttagacaactcaacgagggcttgaatttttttgagacaactcaacgaaggcttgattgtatttcagttgctagttcccctatactggagacacgaaaggaggagttcacatgaatgaattcaacatacggcaaatcggccaacggattgccagcaaacgtcgagaactaaatatgactcaaagcaacttagcagatcaattattggtcagttatcaagctatcagcaattgggagcgaggcaatacattgcctgacatcgaaaaattgtcccagctagcaacaattttgcagttatccattgacgaactattaggaaatagcggagttgcagtaatgcattaccacgagggagtcgccgattctcaggaaatcaccacgttggcgccgatcattaaacctaaagaattggcagctgcgactcaagcccagccttttgaacttgagttagtggagcaattggcaccttttttgagcagtgaagaattatttgctttattgaaacctataacagaaccgctgaccgaagaagcactagaagaatttttaccttttttagagacagatcatttggaacaattgatgaaagaggactatactttcgcttttctggaagaagcagcgccctacttatctgccactttcttagcccaaaaagttgagcagtctgtctcaaactcgctgtctttgtacgagttggaagatattgccccttttctcgaaaagcaagatctaggacgcattcttcaaaagatcctggcagcgtcagagaatccggagcaacggttgtcagagcttgaagacctgctaccttttctcgatgaatctacgttagtaacgcttgtcggatactttcctgtaccctctgaggtttttgaactgtttaccccttttttggctacagaaactttgttgcaagcgttgcgaaaaaaacgttgatttactctttacttttcgttaaccaagatttataatttcgttaaccaactattggattatgtgttaacgaaagaaggatactatgaaactaccattgcgagaacaaatctatgctgctttttttgccatcattattgctgggctgtctcaactaaccatcccattaggattgattcctctgacaggccaaacctttgctgtcggcttggcggtaacctttctaggaatgcgcacagggaccatgtcgatccttatttacttattgctggggttgatcggattaccagtttttgccggcggagcaagtggcatcggcgtcttattcggacctacaggcggctatctgattggttttatctttaatggactcttgacggggaaacttttggaaacaggccgcgccggatatgtgagagggatgttagcgaatatcgctggtgcattagcaacattgttttttggtaccttatggttaaaatggagcaccgctatgtcttggactgctgccatcaatggcggttttgttctcttccttctgcccggtgtgatcaaagccattgctgcggcttatttagggattttcttgcggaaaagattgcagcggtaaaaaaagagaaagtagcaaacgtggactgcttcaagcaataaaaaggaattgccgaaaattgctgctttatttttttgaaatttctgcttatttccgaagaagctactgttagtcgtttattcgaaaaaaagagggactgtgccataagtcatcatccaacaagttaaaccgaataatagtctgttgctaggatagattcctctgacttttgcgacgaggagtccctgcaccgcaggagcaataatcattaatgttcggatagttttacttgtaggagacttatgacacagtcccgcacgcttttatctcgtagcgaatcaatagttgatccatgtgattgcttgctggagctctgctcttaaatgggctgctttgtattgattgaacgctgcttgattagttcgcaaaagtccccgtagctttgttggctgaaaattttctgtcaactgattttccagaacaaatcgtcgggtcaattgccattcatagtaatagcccaaaggacgacagctataaatcgtctgtccaatcacttgatcttcaaaccgacgatgggtatgaccaaagactacttgacgcacattgtccgcctcatcaataactgccccaaattctggtgaacctagaaacgcgttcaaatgattccaacgaacatacttccccgtttgtttgacgataaaggttgctttcggaacaaaatgagtcgttacgatgacttctttatcttgagggagccctcgcaatgtttgacgcagtctttcattgatctgatgactgatttccggatcggttcctgtccgctgaatcatacgatcataccaaaagaggcgcttgagacgaaggatctcttctgtgctttgcaagtcagaatagccgtagtcataccagccattgacacctaacaagagtgttttttccgataaagcgactgtttgaaagttcaagaaagctggatcaggataggtttcgatcaatgattctgataaatcagccatttcatgattgccccaatgaaaggtagtaggcagctgtctttgaaagaaatcaatgacggtcatcgctgctgtctctttgtttgcaatatctccagctagatgcaagtgcgtcgcttgattggcgtctagcaattcggctatcagctgcaagtctgttgcactgaaatgattgatatcgacatgcaaatcgctgataacggctaatttccccatatcagtttcctgccacctttttgtccatgcgcaacagttgaacgttagatgccagcagaccgctgtcactagtcaactgcaagcgctgatagtcaggatcgaccaccaagcgtgtccgctcttctaaatacattgctgcgccttgttttaaccaaactgttccaattgctgtatccagcttcgtatcatagatagacaatccttcttctggataatctgctggtacgaggatcaagcgaaaactaatatctaaccggcaagagatcgccgtagccggaaaaggtcccacaccatcttcaaaatctagataaattcgatctccctcctgtttgacttctgagatttttgctactgctgctgcatccatatcaatcgttatttccatagcgattctcctttacatgattcgtttttgccactcgtctcgggtaattccccgcatcacttcgtccactacttgcccacgaaatcttcgcgcagccggaatctgtgcttccactttcatgccaattttttccatcacgcgaccagatcgatgatttcgctgatcgtgcagtgcataaatacgaacaagcgctaatttttcaaaacccaaagacaaaagcatccgagcagcttccggtacgatcccttgcccccagaaagctttattcaaggtatagcctagttctgccacttcctttagcgggtccacccgcaagtcgatcgttccgatcatattgccactcattttctcttcaatagcaaatttacctaatggcgccgctaaaaaatacattgcaatggcgatttttgtatccacaagtgattgatgcctcggaaaaacaaactccgtcgtttcttcatcacttgcgtattcgaataaatcattggcatctgccatcgtcacaggacgcaaccataatcgtggtgtctcgattcgttgattttctgctaaaatcaataagtggttcttttggatttccatgtttcaccagctttctttctgatcttttttagtctttcttatgacctcattgaaatagctaaatgtttctaataatcgacgctcccttttttgtgctataatataaagcaagaaaacgcttaggaggattttcaatgtccgatgaattggagaaacgcctagatacaggaatgtacgggacacctcgtgttaatccagatgaacaaagaaaatacttgggaacgtttcgtgaacgttgttatctaagtatgacggtagcagaaatgaagaaaaaggacaaccaagaaacgttacagtcggttctccctaactatcaaggggcactgatcttgatcaacggaaaattgcccgaaacgcttcagacgacctttatttcattgattacgaaacaacagctcgattttcgagtggtgactgacgcccagactgctgatcctgacagtatcggtttactgatcgttgccaatgaggcagtgaatgaagaggtaatcgatatcgaagaaaagtatcctcaaaagacaaaatcatcttccgaagaagatcccatcaaagaaaaaaaaccattctgggaacgattcttccgctaaacaaaccaacggatcaattactagtgatccttcactagtacgaacagcaaaagaagttgtattagaaatggtcagctttaagatatttcggcttatttccgaagaagctacttctaaccatttattctaaaaaaaggaacagtgacaaaagccttgtcactgttcctttttcaacttctgactgttaagcggctgttaaaatcgttccggaaaaagcagcttgaggacagacatggttaagcggcggctttgtccttggtacgggtaaatatgcatatgcatagcgggattgaagttcgcttcaataatgccgtatgctcccggatcctccgtgggcttttccttgtcaggaataatcaaatcaatcccactgattcgtgcctgtaatgcggtaacggcatctgcagcgatttttttgtagtcatcattaaattgatcggtgacatcgatcgaatcgccgcccgtgctgatattggaattttcccgcaagtaaacgatttgtcctttttctgggacagaatctatgtgatagccttgctctttcaacatcaactgttccaattcacctaattggatcttctccaacggtgtccgatggtgggtcccccgtaatggatcggtatttttctctgcaactaattccttgatcgtgcgccgaccatctcctattacatttgccggtattcgtagcaaaattgcttcaacttgaccatcgatcacaaagaaacgatactctgttccagcaaggaatgcttcaactaaaatcgactggtcttcagcaaaagctaaacggacagcagcttgatagtcctccaacgaagcgccatccttaaagatcgagattcccacgccatagttggttgttttgggtttgacgacaaaacctctgtcagcaaattgcgggtaagcagcaagcgccttttctacagtggcgaattctgctcctgcaggaacccgaaaaccattctcagctaaaatcttttttgtgaccgttttattggccatgatcaaaggaacgatataacgatccttacttgtcatattagcgtttttgacatattcaacatgttcatcgatcgataatttcaagaactgatcagattcatccaacacttccaccttgattcccttttgaatcgcatcgaacatcaaaatttgtgttgacagttccatgttggtgaagcctgctaactgataaggtttttcccaggcaacttgatgataggatactcctagttcagttgccacttgagcctgacttgacctttggctggcttgatataaacgaccggcaaaagttttgccgggatcttccaacattggcagcagttgatccagtaaaggcattgtcggcagactgatttcctttgcaaaagcgatcaattcttccgcaactactttagcttcttcaagatagatcgtttgattcaatgggtgttccaatgccacttgattgtttttgcgatttccttcttcgacccaagcatcggcatcagcgccctcctctttcgttgctaagtataacaagaaaaggtgcagaaatttcacttgatcttgcgaaataccatacatttcaaagggattgatatcaatattgcgtaattcaatgtaacgaattcccgctgttgctaagtcggcaaccttttgcccccctcgcaggcgaactggtgcataaaactctttttcctcagatagtttgccagtttctaccagctcagcgatatccgccagataggtctcaagagaggcataagacacgttgacatcggtatgattcgtgtagccatagcggctgttacgaatgctgcggacaggttcttgcggtccagaacccgccataaaataattggcttccgtttgcggcgttgctccaaagaaataagtcaaaaaccagcagtaatgcaagtaatttcgggtaactttcaagtaaagttctgttttaaacctacgataatctgtttctgacgacttggtaaataactttcttaaaaaatcatccccaaattcaaaattgaagtggatgccgctgaccatttgcttacgacgcccatacgtccttgccaaaaaccgacgataaagaacatcttcaaaacgatccagctttgcgatcacgatatcctcttctttttccggcaacgcaggcggcatacttaatggccaaagcatctcctcaggtgccatcgaacgataagcaacatcatggatcgcagccagataacgaaatagttcctctgagctttccgcgactggcgtgatcaattccaactgattttcagcaaaatcggtttgtatgtacggatgaaaactacgattgcctaatgcttcaggatgatctgtcccagcaaaacttccgtctaaacgtgcacgctgcgcctcacgttcgatcccataacgcccatcaaataagtagggacgcagttcttcttgtataaaaagtgattttagtgtcatatcattgccctctttgtcttagattcttcttattatagtcaataatccagcagaaaaaaatgaaattgtgcgattctctttgctagttttttaaaaattaccaagtttttacaaattacttgaataaatttgatatttgacctctaaataaagtatacttactatataatagtaaattattatgtcaatattacaacttttttgaaaggaagaatagtgaatgaaaccactcaatcttaccaaacgcgaacgtcagatcatgaatatcttctggaatgctgaaaaacctttgtctgcaaatgacattgcggttcaacaacaggacttaagtaaaaacacgatccaagccgttgtccgaaaattaaagaaccatgatttattgaaagtagctgacatcggctacagcggtactgtcttgacccgcttgtattctccaaatgtttctcaagaagattttctagctgccgaactctctgaacaatcgttgctgaatctagtctcgaatttcattgaaaacagtgaggatgccgagacattgaatgatttggaaaaaatcatcaaagagcggcaagcacagctaaaaaactgatttctgaaacaagttgttcttgttcacagagaaatgtccacgctgaacatttctgacaagacaaggaatctttcttggaatgatttcaatttcaggaacagcagctacatccttttagctgctgtggggaggttttgtgaaccagaagtcacacgtcatctgttacgtattctgctgtggtacttcatgtacatcgcagctgtcaaacgtatgcctataaagtttatttccataaccgatgagctttatgcaagttccttaacaaaaaatatccgaactactactgattactcctaccgttaacgccatcgcgagatgatgaagaggaataatcaaacatagttcggatatttttgtcttatttcaagcgatgaacagcatcaaccttcgttgatgagacctttaaatagcccaacaacaaactcatttggatcaaacggctcaaggtcgttgattccttcccctaatccgaccaatttaaccggtaaacgcaattcattgcgaatcgctaaaacgatcccacctttggcagttccatctaatttcgtcaagaccaatcctgtaacatccgtggtttctttgaattgtttggcttggttcatcgcattctgaccagtcgtcgcatctaacacgagcaacacttcatgaggcgcattcggctctactcgttgaatgatccgtttgattttctctaactcattcatcaaattgactttattttgcaaacgaccagcggtatcaactaatagaacatctgcttgctctgctttcgctcgttccatcgcatcaaatacgacggctgccggatcaccaccagctttccctcgaacgacttccacacctgctcgatccccccaaacgacgagctgatcgattgctccagctcgaaaggtatccgcagctgccaacaacactttcttgccttctgatttgaattgatgcgccagttttccaatgctggtggttttaccgacgccattcacaccgacaaataaaatgacggtcaatccaggttgcatatttagttcgttgacttcgtcgacacccgcttcaccgtaaagatcgactagtttttcaataataacattttgaacctctgccggcttcttgacatttcgcaacttgacctcttgacgcagtgcatccgtgatcttgatcgctgcatcaaagcctacatcggctccaatcaatgtctcttcgacttcttcaaaaaaatcttcgtctacagagcgaaaattcgcgaacagctcattgagtcgttgcccgaaagttttgcgagatttcgatagtcccttcgtgtacttatcttgtacatcctctttgtgaaccgctgttggctgaggttgtacttcaggtttttttaccgtttcactaggtgtcacgacgtcgaatggttcagctgatttcagatcttgtgctccttctgatgatgaagtatcagccgcggactcctctgtttctgttggctgcaacgcggaatcggtagtagtttctggacgagaatccagtgttggttccgtcgattctactgtttgttcttgtgcggaatggtcatctgcgacggatgactcatcgacagatgactctggagattcaactggttcctctacttcgccttgcactttgtcttgctcttttgattcaccaatcaaagcttttttaattttgtcaaaaaatcccatttcaaacgcctcctttcaaaacatatttttcgatgacagttgctacaccgtctgcttcattcgaatctgttaccacatctgcggcttccttgattaaaggcacggcattagccatcgctacaccgagtcctgcatagcgaatcatcggcagatcattttcttcatctccgatcgccatgacttcatcgatagtgatacctaaatcccgagccagcaattcaatcccataggctttcgtaattcctttaggcataaattccagcaaattattccgagttttgattacttcatatttctctctgattgctgaaggaattgccaaaatcttcggatccagtacttcttgatgataagcaatcacagctttattatagagtttcgactcatccagagcttctatcgcatacgggcggcaatccagcaatggattcagcgaaccatagatcgactgattcgttgctgaagtcggcaagcacaaaacgatttcttcggatacgacatccagcggcaaatccagttctgctgcgacagcaaccaattcatgaatatcagccaattgcaaagcggctttttccatgatttctcccgtatcgtttttttgcaccagaccaccattaaaagtaatgctatagtcccctgattcattcaatgacaactcttctaaataaggacgaattgcccgtaaaggacgacctgtgcaaaggacgatttttactccttgtgcttttgcttgggcaagaacttctttatttttttgcgatacttgtttctttccatccagcaaggtaccgtctaaatcaattgcgactaatttgatcattttgctactccttcttgatctgcgacaaaatttccgccttctttgacatcttccaaacgcacagaaacggtcttagatacaccggattcctgcatcgtcacgccatacaacacatctgccgcttccatggtccctttgcgatgtgtgacaacgatgaactgtgtatcattttggaagtcgcttaaataatggccaaagcgtgatacattggcttcgtctaaagcagcttcaacttcatccagcacacaaaacgggacgggacggacttgaatgatcgaaaacagcagtgcgatggctgtcagcgctcgttcgcctccagaaagtagactcaagttttgcagctttttacctggtggttgggcttcgatctcaataccagtatttagtaagtcctttggatctgtcaaaatcaattccgcatgtcccccgccgaacatattggggaaaacttgcttgaactgcagacgaatcgcatcaaaaatctcaccgaaacgtgttttgacttcttcatccatctcggacattgtatcgaataattgtgcttttgcagaaagcagatcatctctttgactggtcaagaagctgtgacgctgttccacttgatcatattgctcgatagcattcaaattgactggtccaatcgcatcgatttttccttttagatcttggatttctcgttttgcagcttccgggtcatcgattgctggatagtcattggccgctttttcaaagctcaatgcatattcttcctgcaagtaagccaaccgattatccatcaccaaatccgcgcggtttttctcaatttctacattggtcttttcggatagtttttctttttgttgcaagtttgccaaactgagagcttcatccaactgtccaatttcctgttggacgatttgtctttgttgccgaatgtccgccaattcttgtgtcagtgttatttttcgttgagtaaaatcactgatttgctgatccaggctttcttccgaaatttcatggtcactcacattcgaattgattgctgctaactgccgttctagcgactgttggcgtgcttcattctccgctaacgcttccgcattcgcagcaattttttgtcttaaatgttccacttgttctttttgaacagcaaaatcagcttgtaattgggcggctgtcgctgctaactggcttctttttgcttcgattaaatcttcttctgcattcatgctttgaatgtcgtgatcgatttttttcagctgctgcgcaatggtttgctgttccgattccaaccgagtcttcttctcgttatactcttcaaaaaaggcctgaatctcgcgattttcaaagtcaaagacttgctgctcttttctcaaccgttccaactcgttggtgaggttttgcagttgattttttagttcgtgttccgtcattcgagccgtttcaccggtggttcgcagctcttccaaggctgcttgagcatcttttgtcaccgtttcgaagtgctgcacttgtttctctgttttttgcaggcgttcatccaattgaacggcttgagccgttaattgctgcaactcattgctttgactaaataggctgccggcatttttcttcgtcgctccaccggtcatcgaacccccggcattcatcacgtcgccttccagtgaaacgacacgatagctatagttcagcgctttagctaatgcattagcacttgtcagatcttctgcgatgacgatacttcccaatagattttcggcaatattttttacatcttcattgaaacgcaccagctcactagcaacgccgataaatcctggtacttgttgtgcttgagaaacagcataactaggtaattggcgagacttgattgtcgtcaacggcaagaatgtggcccgaccaccacgattttgtttcaaataggtaatcgctgctctggcatcacgttcggtttctactactacgtgctgggcagaagcgcccagtgctgtttcgatagcaactgtatattcttctggtacttcgatcaattctgcaacagcacccacgacaccggttagctgctgcttattttttagaactagtctgacgccttgataaaagccagcatagttttcttggatatcctgtaaactccgttgttttgcccgcacttgttggacttggttcattaactgatacatttttttctgtgcatcatcaaatttttctttgttctctttggctttctcttgtaaatggatatattgcttccgctgttcgtccaactgttgctgcacggcttgcaagcgttcattaacgatttctgcggctgtcgctttttctttgatcgctgtcgacagttctgtctgcttcgtaacggctgtttgattttttgccgattcttgctggtattggcgctcaagatatttgagctcattgccgaccgttgcttgctcctgcattgcttcaacatattgactgcgtaattcttcgatgatctctttggccgatttctgatacttttcttgttccgctcgacaatcagcaatcgctacttctgcctcttggacactgcgattcttttgcgacagttcatgaatcaattcagctttttcgtcattcaactgttggaggcgttcactgacggcatccaaggtctcttgatattctgctgtgcttttttgcgtatgcttggagcgctccaacagtacttctttttggccttcggcttgcttcagcccttccgttacttgcaacagctgctgattgagctgctccaatgattcatcgaaggctgctcgacgctgccgcaattgctgcacactgcgttcatcggtattgatttgctgcgtgatttcagccaactgatgatttaatagttccagctgttctgtagctgtttcccacgcccgtttggctgtctggatctccatgacagaaaaagccacgtctacttccgttaatttttccttcaatgacaaaaattgtttggccgcttcactttgagcagctaacggaatcaattgatcctctaactcataaataatatcttgtagacggttaaggttgtcttctgtttcaaacaatttctgttctgcttttttcttacgctgtttgtatttcaaaacaccggcagcttcttcaaaaataccgcgacgatcttctggtttgctgctgaaaatcgcttcgactttcccttgagaaataatcgaaaatgattcttttcctagcccggaatccataaagagttcctggacatctcgcaggcggcaactttgtttgttcaaataaaagtcgctttcaccggttctccttaaccggcgagtcacactgatctcactgtaatccattggtaaatagtgatcggtattatctaaaataatcgttacttccgctacatttaatggcttgcgagtgtcagatcctgcaaaaatgatatcaggcatcttgccaccacgcaggcttttggcagactgttctcctaaaacccaacgaatcgcttcagtaatattgctcttgccgctgccatttggtcctacgaccgcagtcacactattttcaaaatcaatgatcgtgcggtctgcaaaggatttgaaaccggcaatctctattcgttttaaatacactccgccattcctttcttattgatcaagacttgctaaggcattttctgccgctgcttgctctgataatttctttgattttccttgcccctcgccaatcagcacatcgtcacaatagacttctgtccaaaagattcgttcgtgggcaggaccttcttctttcgttaaacgatagttgatggacacatcgccagatcgctgcaagacttcctgcaatcgggtcttgtgatccatctcatgggaaaaagcacctgcttttacttttggaaaaacaacagccgtcaagaaaccgtcgacgctctccaaaccttgatccaagtacaacgcacctaaaaaagcttcaaaaagatcgcataacaatgagggacgcttacgtccgccagagttttcctctcctttgcctaaccgaatatattgatcaaaacggcaatctttggcaaacattgataagctatcttcgcgaacgattgctgcccgcagctttgtcaacttcccttcaggaaggtccggcagttcacggtacaaataccgtgagacgatcaattctaaaacagcatctcctagaaattctaggcgctcattatcggataggtgcaaattgcgatgctcattcacataagatgaatgcgtaaacgcttgttcgagtaaatctacatcatggaagacaatgccgtaatcctcttttaattcgttcattagctgtgtattcatttgccacattccttcattagtttatcgacacttccctattatactggtttttggctaattatgaaatgtttcgtccaaaaacttgaagcctccataaaaaaattttaaccgtttattctcctgctctttgtttccatgactgattcattgttttttattgattttgccgcgaacaaaataaaaaaagacgttcccgaaagaacgtcttttcctaaattagcgagattctgctgttacagaaactgttgcccatggattgtgatctgcatcatatgcccatgtgaaatctttgacgcgattagatactggtaatacttggttacggtaaagcgaaggaataacaaatgcttcatccgcagcgtattcttgccatgcatcaaatgcttctttacgttttgcttcatcaaatgattctttagagtcgattgcttctaatagcttcgtattttcatcagattcaaaacgagtgtagttaaatgctgattttggtccataaagtccggttggtgaaggatctgaacctgttccccatgcaccttgatacacatcgatttcaggatcatcatttttcaatttatcatagaatgcttggaaatcaatcaaacgaccagttgtgtatttcacatctaagccgatttcattccattgttggatgtagtaatcagccaatggttgagctgtttcgccacctgacattgaagcaaaattgatggttaatttttcaccgtttttgtcttcacgcatgccgtcgccgtcaacatctttgtaaccagcatcgtctaacaatttgtttgctttgtcgatatcttgtgtgtaacctttaacttctgtatcgtgcaatgttccaaataccggtgggatcaatgttgtcgcatttgaacgtaggccattatagaaacggctaccgacagcatcattatctagtgcgtaacccattgcttgacgcaatgatttgtccgccatttttgattcaggattgtagttaacttttccttctttatcatcccaagtacctaacttaaatccaatatacgtataagcttgctcaggacggcccaagatttggtagccatctgcatctttgtaagttgggtaagtatctgttggcattgacaatgctaaatcatattgcttcgcttttaaaccttctacgattgaagctgctggaactgctttaaatgacaatttatccattttaggtttgccaccgtagtaatactcatttggtacgtattctacagattcaccggctacgatgtttgacattacgtaaggtccgaaaacgattggtgttttacgaacaggatcacttgattccatatctttgactgcaataccttcaaacgcatgttttggtaaagcagaagaccagataccgccgcctgcttgcatcataccagggtgaacttctttgtattgaattttaacgactttgtcgctttcttttgtgattcctgagattgtgtcagatttgccatcgtggtaatcttccatcccaacaatatttgtaaagttgttgtcataacggattcctgtgtaatctttgttaccgatcacttcataggagaaaatcacgtcatctgctgttacatcttcgccgtctgaccatttcaaattgtcgcgtaatgtaatcgttgctgtgttattatcttcatctaatttaagatttgcagccccaccatcaacaattcgaaaatcagcatctgttaagaataaactttcattacttggttgcatgaactgagaatcataattgtcttgataaaattcagtttggaacaaaccttggaattgtgtatccataactactgcgacgtccaatgtaccgcctttgattgcttctgcgtcatttttgacttcaaccggcatagagctaatatcttctgtttcagttgctgagttgctgccgcctgatgaatctgttccgccactattgccgccacaagctgccaatgctaagactgacaaaagtgtgaccataccaaaaatatttttcttcatcctgtatcctccttgttttaacctagtcgttgacgtgcatcggctgaacgcttaaatgcctgaccaacgtagtttatactcaacatcaatactaaaatcaatattgacgcgggtaaccatatccattgtctgttgaccagcacatcaccgctgctggcgtacccaatcaatgttcccaaacttggaacattcgttggcagaccaaagcccaagaacgttagagttgtttcgataccgatatttgctgcaaagttcatcgtcaagttggtgatgatcaatgagcttaagttcggcatgatttcgcgaaacatgatcacaaaatcattggtccctaatgtttttgacgcactcacataatctcggcgcccttcagaaagggtcttactgcggaagagtctcgcttttccgacccaataaaaggcactcatgacccagataaacgtccaaacattgtagcgaggtatgatcgaaacaataacgataatgatcaacatgatcggtaagatcatgacaaaatcgacgatacgcatcaagatattatcaatcaacccgccatagtaacctgaaatgatccccaagccaactccgacgatcgatgtaatgatcgtgatggaaaacccaatcaaaatcgaattacgcgctccaatgatcaattgtccccaaacatcacggccaccttcatccgcccctaataggtaggtgccgccatttggtgagactgctcctggtgcagcatatttatctagaatacttacatgcatgacttggctttgatcaatgactgccgagccgatgaatacgaaaagcagtactgctaccaacaagaccaacgaaaaaatagcgatcttgtcttttaaaaattcacgaaaaatcatttgtaatcccataggtgggatactttcttgttttaacactttttctttcttttcagacacgtttatcccctcctactggattctgattcttggatcaacaatactcataatgatgtctgatagcaatgtaccgatcaatgtcgccagacctaatatcaaagtcaacgaagtgatcacggcataatcccgctgtacaatactatcgataaataattttccgacacctgggtaagcaaagattttttcaatgaccactgaaccagcgatcaatgaagtgatctcataccccatttgagatgcgatcggcaaggatgcatttcggaacacgtgacgtgagaagactttactagttggcacccctttcgaacgagcagttcgcacgaaatccaatgatttggaatcaatcacttcactccgcagatactggatcgtcacagcggtacctaatagcgcagaagtgatagccggtaagatcagatgatacagacggctccaaaactcagccattcccgttacgcctggtgctacagaccccccagttgggaaccaacctaaacgataaccaaagataaacagtgcaatcaatgcaaagataaacaatggtaccgcaaaactaaagaagttatacacgacaacgactttatctaaaatcgaattttggtaacgtccagccaacattcctaaaggaatcgcgatcacatacgttaagataactgttaacaaagatagccacaatgtgttgctgatccgtcctgaaagtaatgttgctactggtagtttatagataaaactttgaccaaaatctcctttaagtgcatttccgatccaacggaaatattgtgtataccaaggatcattcaatccggctgcttcccgcatccgttcaataactgctggatcttggttcggattaatcaatcctgtaaatggatccccgggcattgcttgtgcaatcaagaaaattaagacactcaaaataatgacttgcgggatcattaatatcaaacgacgtagaattgttttccacattattcagcacccccatttttcaaagcgacttgatgtgtttctgtgatggttctaaggtcataaacacgacctgtttcatcatagtaatctttttggtgagtgacatattccaactctacccgacggcggttttctttatgcgcctcacgatttttcacatcaatttgaggaatagctgacaataaccgcttcgtataaatatgacgcggatcttgataaatatcttggcgtgtaccgatttcaacaaaacgacctttatacatgatggcgatattgtcgcacatgtgtttcacaacacccaagtcatgagagatgaataagaaacttaagccaaactcttgttggattcgtttcataaagttgagcacctgtgcctgtacagacaggtccaatgcagaaacaggttcatcagcaacgatcaatttagggttcgatgccactgcgcgggcaacccccaaacgttgtctctgtccaccagagaattcatgagggtatttgtataaagcatcttctggcatcccaacgatatccaaaagccgtttcacccgttgtttttcttcttggtcactcaaacgttcaaaattccgtagcggttcagcaataatatccactacccgctttttaggattcagacttgacatagaatcttgaaaaatcatttgaacatccttgttgtaattcatttttttgcggacagagcgctttgtgacatcttgtccttcgtaaatgacttcaccgctggtaatcttttccaagccaacgattgctttccctgttgttgattttccagagcctgattctcctaccagaccgtaagtttttcccttttcgatgatgaaatccacaccgtcaacagcatagacatagtccgttacgcggttgaaaaaaccgctgcgaatcggatagtggactttcagatctttgattgtgattaattctgacatctacacttctccttcttcgtctctaaaatgaaaatgcttatagcaagtacagcgaactaaatgatctggtgcaacttcatgcaggacaggattttcttcgtggtcactagctgggatccaagggatacgagcagcaaaacggcaaccagttcttggcatgtttttcaatgaaggaacgacgccttcaatcacgtgcagttcactgtcttgagaatcttcttgtggaattgagttcagcaaagagcgtgtataagggtgttttggatttgcaaacaactcttccgctgtggcaacttcaacaaactgaccgccatacataacggctacacgatcagccatttctgccactacacctaagtcatgggtgatcaaaatgattcccgtttgtgtttcagcctgcaaatctttcaacaaatctaggatctgtgcttggatggttacatccaatgcagtggttggctcatcagcaataacaattggcggtttgcatgcgatggcaatggcaatgatcacccgttgccgcatcccaccggataattcgtggggatactggcgacccacccgtgctggatttggaattcctacttgatctagtaattcaagggcccgggcttgtctctgttccgcattcatatttgtatgataagataaaccttctttgatttggtcttcaatacgcatgagtgggttcaaagcggacaatggatcttggaaaatcatcccaatgtcgttcccgcgaattttgttgtaaagtgtttcatttaagtttgacaaattcaagtctttgtataagatttcaccggtgattttggtattgtttggatcatgcaatcccataatcgttgtagctaaggtactttttccacatccggattcgcctacgatcgctaaaatctcattgcgttccaacgtaaaagaaacaccgtctacagcgtcatagtaatcatctttaatacgaaaacctgtatgtaggttttgaacatctagtaattgattatcagttgacaatcgaatacccctctcttttttataagatgaagtgccctctaatgtaaaaaagtaggaattataagtcaaattccaaatgctttcttaacatcgtgtaatattttcttaataattatatagaatcactcactagattgcaagtctataaatttttaagatactgaattttcagaatacttacattccatttacattttttcaggatggtgcaaagaaaaggcactttttttcgagaaacgaatggttattaaacaaattctgataaagaaagagctgggtcatctatgactcagctcctgtatctgtcttaagcaagatggcttgaaatataatcaactgctccgccgactgtttcaatctgttcggcatcttcatcagaaatctccgtaccaaattcatcttctaattctaagacgaattccatcacactgattgaatcagcatttaagtcgtctttaatactcattgtatccgttactttatctgcatcgatctcaaaatggtttgcgatcactactgcaactttcttgaatacttcttctcgcgtcaattgccttcacctccacgcgttcgcacaaaacatagaatggctaacaaacattgtactgcttacatgcaaatttgtctagtccttttttgcattttcattacaatgattgcagtctcattgcgttggctcttcatgcttaggtgtttcttcaaaatgagccaccaattgaggaaccacatctgcctgcaacatggtatagatttgtttgatggttgctgccacggcatctggtccagtcgctccatgtgttttgatcactggtgctttcagaccaaacaagacagcccctccgtgtttggcataatccatctcattttttaaattgcgcaaggcatctttcaataataaagcccctaatttccctttggttccggaattcatgatggattgtttcaataacgacatcatattcaatgcggttccttcaatggatttcaagacggcgttcccagtgaatccatctgtgaccacaacatccgctgcaccgttcaaaagttccctagcttcaacatttccgataaagtgaatcgatgattctttggtcaacaattcaaacgcttttttggttaactcgctgcctttggtctcttccgtcccattgtttagcaaccctactcgcggttgttgaatgcctcggactttttgagcgtaaaaagaacctaacacagcatattgaacgagatgttctgctttattgtcagcattcgctcctagatccagcatatcaaagccagtttctttcccaagtacaggcatcgtcgacattaagccaggacgttcgattcctttgatacgacctacgataaacaaacctgcagctaacaaagcaccggtatttccagcagagaaaatggcatccgcttgaccttctttgaccgcttgggctgctaagaccatcgatgcgttctttttgcggcggatcgctttaacaggttcatcatcactgttgattttttcatcggtatgaatgattgtaagctgactttcgtctgtcacatattttctgatttcatcttcttttccgtataatagaaattcgatttctggatattctttttttgctaacatgacgccttcaacgatcgcttttggtgcgttatcgccacccatggcatctacggcaattttcatgacatacgccactcccttcatttttccaagttagtataccatattctttaatcaaaaaattgattgtctcgtttttctgctgctaaataatcggctagcgcttgatactccggtaaaatctgccattggtgcttctgccagatttgagttgcttctacttgtgcaacttcaagaatatgggcatcggctactaaatcggctgcggcgaattcaggtaaacctgattgacgattaccaaagacttccccgggacctcgcaattgcagatctttttcactgacgacaaagccattggtggtttcagtcatgattttcatccgctctattccggtttcatttttgggatttgccaccaaaatacagtaagaagcatctgcaccacggccgacacgcccccgcaactggtgcaactgagctaacccaaaacgatctgcatcaataatcaacatgactgtcgcattgggtacatttacccctacttcaataactgtcgttgataccaagatctgtaactggttgtccttgaactcttccatgatcgcgtctttttctatatttttcattttgccgtggagaatgcccacttggtagttaggggcaaaataagcctgcagctgctcgtaaatctccgtagcattcttgacatctaacatttctgattcttcaatcagcggacagatcacatacatttgatgtcctttcgctaattcctgacgagcccagtccagcacagattccaattgaggtggtcgtacccaacgcgtttcgaccggaatccggccagctggcatctcatcgatgatggaaacatccatctcaccataggccgtgatggccaaggttcgtggtatcggcgtcgccgtcatgaacaaaacatccggcaaatatcctttttctcgcaatatttttcgctgattgacaccaaagcgatgctgctcatctgtgatgactaaacctagacgggcaaaattgaccccttcttggatcaacgcatgcgtccctacgacaatatcgatctcacctgcagccaattgctccaagatcactcgccgttcctttgtcttggtggaccctgtcagcagtgccgttgtcacttctagcggatcaaataactggttaaggctttccaaatgttgttgtgccagaatctcagttggtaccattaacgccccttgaaagccagctgtcatagtggcgtacagtgcgatagcagccacaactgttttgccgctaccgacatctccttgcagcagtcgctgcatatgttgcggacttttgaggtcatgacagatctcgttggtgactcgcttttgagcagcagtcaattcgaaaggcagtgtctgggtgaaagcttttaaccgctgaacatcatagtcaatggctaagccgttcttttcagccttttcggaaattttcaatccttggatctgcatttgaaataggaagaactcttcaaagatgattcgccgctttgcttgatgactttcttgcggatcttttggaaagtgcatagctcgcatagcagtctggcgatccaataaccgatatttctccgttaaagttagaggtaagatttcctcgatctggtctccgtatgattcaaatgcctgcctgatcaagtcaaccagcacgctttgccgtaccgatttgtttacatgatagataggagcgaaatcacctggcttcttgctgccaagaatcttcatcccagctagtgatttccgtttcgcatcccatttcccgtaaaccgcgatttcttcagacaaaacaactttatcttttaaatagggctgattaaaaaaggaaacattgaatacatcatgatcttgcatcattcgaaactgcagccgactctttttgtaaccaaaacgatttacaacagccggggaaacaacgattcctttgatcgtgactttttcttgatcttgtatctcgttcaattgacgctcttgaatatcttcgtagcgaaaggggtaatatcgcaataaatcttcgattgtctggattccaagcgctgcgagatcttttgctcgcttttctccgacaccagacaaaacagtgattggctgatcaagcatttcttccctcctcaaaactagttgtttgcagattgctttctttattttactcttctctgtttaaattacgaagaatttgaatgaaaaaagatgagcaaaaacaggctgtttctctatcaatcaaaaaagagacggaaacaaaaatcgccctgcgacttttgccccgtctgctttcaagttttattcagccgagaaaagatacggataaacaggttgatctccttgatggatctccacttcgatctccggatagatttctgtcaatgctgcttcgatttttgctgcttcttttgcttttccttcttcgccgataataatcgtaacgatttctgtttcatctgaaatcatcttctgcaatgtatccatggaagcagagaaacaatcgggtacagaaaccacgattttcccatcaaccattcccaagaaatcaccttctgtgatttcaattccatcgatcgctgtattacgaatcgcgtgtgtcaccgaaccactgacaacacttgacaagatttcagtcatcgcttgttgattttccgctaacgttgcttgttcattgaaggccaacattgctgtcatcccttgtgaaatcgtacgggtctcaacaacagcgactgggatgtccgatacttctgctgcttgttgtgcagccataaagatattcttattgtttggtaagacgataacctgatctgcgttcacttcattgatagcagtcacgatgtcttccgtgcttggattcatcgtttgaccaccgctgatcacatagcttgcacctaagctggtaaatagtttatttaatccatcaccggctgcgatagcaatgattgcataaggtgtacgcggacgtttcactgcagcagagggttgatcgtgctccagaattgtttcatgctgtacacgcatattatccaccttgatcttgatcaaagaaccaaatttttggccatagttcatgacttcacctggatgttctgtgtgtacatggactttgataatctcatcgtcattgacgactaaaagagaatctccaagttcgtttagataatttcggaatgtttcataatcaaacgtactgtccactgttggtccttcaccaattttgaccatgatctctgtacaataaccgaatttgatgtcttctgtagccatttgtccttgaacgctgcgatgatgttcggcattgaccatttcatccattgctgctggtgttggttcatagacctcattggcttgatattctccagtcagtgcatttaagaacccttcataaatgaacaataatccttggccaccactatcgactacaccaacttctttcaagactggcaatagatctggtgttttggctagcgcacgttttgctccgtgaacgactgctttcatgacttctacacagtcatcactagtttgtgcttttttctcaccgtattctgcagcgatacgtgctactgtcagaatcgttccttctacgggtttcatgactgctttataggcggtttcgaccccatgtgtaaaggcttgtgccaattctggcgcagttaatgtttcgaccgtggggatcgctttagcaaatccacggaacaattgagacaaaatgacgcctgagtttcctcgtgcgcccattagtagtccttttgaaagagttgtggcaagatcgcccactttttctgaagtggcatctgctactgctttagcaccgcttgtcattgataaattcatattcgttcctgtatctccatcaggtactggaaatacattcaatgaattgacaaactctgcatttacttgtagacgagccgcgcctgcctgcaccatctcttgaaactgacctgcgctgatattcgttaccttcactgataatcctccttaaaatcatccgccgcaagcggatcacttgcctaatctggcagtacacgtacaccttggacaaaaacattcactgaatttgctgaaacgcctagcattgtttcaagattatatttcactttttcttgcacattgcgggaaacttcagaaatttttgtaccatagctaacgatcgtgtagacatccactgcaataccgttttcttcttgacgaacaacgacaccgcgagaatagttttctttgcgtaaaatttcattgatgttgtccttgatctgtttcttgctggccatgcccacaataccaaacacatctgttgctgcgccaccgacaactgtggcgatgacctcgttgctgatttcaataatacctgatgaggttttgattttcacagccataatatagcctccttaagcgggatattcccatctttcttctctcacattttatcatagctgctagtcaaataaaaggatgtgacttatgaaaaggggcttggcatcagatattcttgtattctgaccttgtttaatttacaatgtttactgctaaaagtcaatctttcttgaaaattacccttgcattttctaactttctatgataaattcagatggtatgagctgaaatagcgctccaacatcaaggcaaaggaggaaataaccacatggctaaagtttgttactttactggacgtaaaactacaagtggaaacaaccgttcacacgcaatgaatgcgacaaaacgtactgtgaaacctaacttgcaaaaagttcgcgttatgattgacggaaaacctaaaaaagtttgggtgtcaactcgtgctttgaaatctggaaaagttgagcgcgtataatcttaaccacacattttcggccgttcttgcgagcggtcttttttgttgtcttccgtttcattcctcctttcctttcttatgtcctttgttttttctttaaacagctaatgacattgtttttttaatcctttgaattatggtacactaataaaaaattcataaggattaggtgactattcttggctactatcaaatcattcatcaaacaacattggccttatatgaccgccagttttctgctgccgttactgattatggcagtcatttatttaacgatcggaatctatcccggcagcagccgcagtgtcttagcgagcgatgccttttcgcaattttcgaatttccatgccagttttcgtaatgtcttattaggcaagcagagtatcttctatacttggaatgcctctttagggttgaactatcttgcactgatctcttactatttaggtggtctttttacgccgctggttttattgtttcccaatcaattgatgccagatacgctctatgtgctgacacttttgaaaatcggcagcgccggactcgcattttggttttacgcgagtcaaacatttaaaatccaacggtggcatcatgttacgcttgctgtctgctatgcgttgatgtcctttatcactgctcactccgaattgatcatgtggctagatgcacttatttacctgccattagtgattctagggattgatcggctcttgcaacaaaaaaaaccgactcttctgtttgtcagttacctactgttatttatctcaagtttttatatgggattcatgatcggagtgttctccgtcttgtatctattcgtgcaattaggtcgcgattggaagcaaaacaagaaagcaatcatcccttacggcatcacttctttattagccggtggggcttccatgatcatcattttgcctgctgtacttgatttacgttcaaatggggaagaattgtccactatcacgaagttcaagacagaagctactggtgttttcgatcttgtaatgaaaaatatgattggcgtatatgatacaactaaatacggttcgatcccgtttatttatattggcctactgccattactactttgtattttatactttgtttctaagagaattcctttaaaagataaactgctatatgctggattgtttagcattttgatcgccagtttctatatcgttcccttgaatctcttctggcatgggatgcatgccccaaacatgttcttgttccgctatgcctatttgttctcctttctagtgattcttttggctggttatggttgggaacagctgcagcaaaaagaccgaggtctgtttgtgattgtcggactatctacgattgctctctttgcactttcttatggactgggaggaaactcgtatgaattcgtcaccacagcctcttttgcgttaacgattgttttctttgccctttacttgctgtgtatcggtttcggtcaacttggtatgctaactaaaaagaaagtggcacttctcttgttggttttcgtttgcggtgaaatggcgatcaacacgagtgggatggttcgcggaatcttaaatgattggaattacgcctctcgaagtctgttcactgatccttatccttcaatcaagcaattggtggatcaagccgataaagacaatgagacctttttccgtttggaaaatctggatcccgtttcttccaatgacagtatcaactatggttacagcggtgtcagcatgttttcttcaatccgcaaccgcaactcctctagttacttagataaattaggttttcgttcaagaggaacgaatcttaatatccgttatccgaataatacattgctaatggatgctttcaccggcatcaaatacaatattagcaaacaaaacttaacaaaatacggttttgaacgcgtaggagaagctggagactacaagctttatcaaaatagcaacgctcttccccttgccatgttagcagagccttcgatcaataagatccaacagcctgccaacgacaatctaaccagccagaagaatttgatcaacggtttggcaaacattgaacaaaactattttgattttcaaccgatcactgtcattcacagcaaaaacaccgatatcactgaaaatggcatgtacacgacattccaagagcaagaaagcaatgtggcgaaagagattacttggcaagtagaagtacctgctcattcccaagcctatcttagtctgtatccggcaaacttcggtgaattagagagttctacagctacgatcactgtgaacggggaacagcgggaaagtcaaattggaatcaatggtcaatattatgatctaggctactatgatacggcaacgaccgtgcagtttacggcaagtttctatggcactcagtcaatttctttccaaaacccacaggtggtgacattagacactaccgcctttcaacgggcaatcgatgccattcaagagagaggtgttgcgatgactgtcggcaaacaaaatgccgaagccgatatcactactgagaaagaacagcagcttatcactacgattccttatgacaagggctggtctgccaaactggatggcaaacctatcgctattgacgctttccaagatgcgtttatcagtgtgaagatcccaagcggtacccaccatcttgaactgacttatttaccgcaaggttttgtgatcggagtcattttattctttagctgcctactgctctttattttgttccgctatttctatcaaagaaaagtagcagctgagatagaacacacacccacagacaagccaggcagatgagagcaatcgataccttctttatctgccacaatagcagtcagctgcgaaaagaagcgccccccaacggatcgatacgaatcgaaccttaggaggcgcttctttcttttagttctcttttattcataggctacgcgaaccaaatacaacccttccggatgagcagtaggtccagcggcattgcggtctttttgggcaataatggcgggaatgctatctgctggtaagcgtccattaccgatcttcaacagggttccgaccatgatgcggatcattttatataagaagccatcgcctcgaaaggtaaagagtagttcgtctccggcctcattcacttccatactagcttggtgaatcgtccggactttatcttctacggagctgccagtggcacaaaaactggtaaaatcatgcgtacctaataaatcgggtaaagcttgctggattttcattaggtccaacggatacgggtaatagcttgcgtaatatctacgaaaagggcttcgtggtttgccgatatctacgcgaaattgataggtcttctcccgcacaagatagcgggcgtgaaagtgttcatcgacgattttcacctgtttcacagcaatatcttccggtgtttgtgtatcaagtccaaagcgcattttttctaatggacgttcgtcaaagtcaaaatgaatcacttgacctaaagcatggacacccgcatcggtccgtcctgaaccgtggatttggactgcttgtccattgttcatgcgagtcaatgttttttcgatttcttcttgtactgtgcgtccattgggttggcgctgaaatccttggaaattggtgccatcgtaagcaatcgttgctttataacgtaccatcttctcacctgctttcattttctcaaaaaaatctgaggagccgattgcactccccagacatttacttttatcctcttaataatactaaacctactgtaaagagcacaaagaccaacactacgagtgtgtcgcggttgtgccagtgaagaatccgatacttggtccgcccttcaccgccttgatagcctctagcctccatggctgtagctaggtcctctgcccggttaaaactgctgacaaacaaagggatcagcaatgggacgatagctttcatcttttgcaacaacccgccttctccgaaatcgactccgcgggcacgctgggcattcataattttctcagtctcatccattaatgtcggcacaaagcgaagtgcgatcgacagcatcaaagaaatttcatgcacgggaaatcggatggcttttaatgggcgtaatatatattcgattgcatctgacaactccaaaggtggtgtcgtcaacgtcagcaatgtcgacataaaaataatcaaaacaaaacggcaaaaaatgaacgcaccattctgcaaaccaaattcggtaatattgaagatccaccaggaccaatagacttctccacccgtcgtaaagagaatctgcaatgctacagtgaataaaatcagccagatcaacgggcgaacaccacgaacgaaaaaacccaaatcaattttggaaagaaaaatgctaaatagcgtaaaaacagctgccaaaagatagctctgccaattgtttgccaaaaaaatgattccaataaaataaaaactggcaagtaatttcacccgtggatcgagtttatggataaaggaatctcctggaataaagcggccaaagattagtttattcatcatttgcggtcgcctcctttgctaccagttgatccgcaagttcttctgctgtcaatggcaagtgttcgaaatgcaaccctttcgcttgcaacaacgctgcaaaagcagttgctgttggtacgcctaattgtttttcttgtagccattcgatatcttgaaaaacattcttcggtgcaccctctttaacgattcgtcctttttctaatacatagacataatctgcaaaattagccacatcatccatcaaatgggtcactaagatgatggtcatatttttctcttgatggagtcgctggaacatctccatcatttctttgcgtccttgtggatctaaacccgctgttggctcatctaataccaatacttccggttccattgctaagaccccggcaatggctactcggcgcatctgtcctcctgagagatcaaatggggaacgttcaagaaagctttcatctaaaccaacgagtttaatgtactctttcgctaattcagctgccgcttcttcactcacaccaaaattttggggaccaaaagcgatatctcgagccacagtttcttcaaacaattgcgattcaggaaattgaaagacgattcctacttttttacgcaatggttttaaattcttattatcagtttcaggagtgatcacgcgatcaccaatcgtcactttgcccgctgttggctttaataatgcattcaagtgttgtagtaatgttgatttgccactaccagtgtgacccaccaatgctgtatacgagccttctttgatttcgagatcaatatcgaataacacgcgttgctcaaatggggaatgcggttgataagtaaatgctactttttcaaaacggatgtccatagccaatccaccattccttcctctgtcaagtacgctgcaggcacagagatgccgcgctgcttcaaagctgccttcaatttttctggaaaaggcaaatctagacccaattcgatcaattctgggccagccgaaaagatttctgccggcgtcccttcacgaaccagttctccttggcgcatgaccatgacccgattggcattggctgcctcatcaatatcatgggtgattgacagaacagttaaattattttcttccttgattttcttgatcgttgaaataacttcttctcttccttcaggatcaagcatactagttgcctcatctaaaatgatgatatcgggacgtaatgccacaacaccagcgatggctactcgctgtttttgtcccccagaaagtctggctggttctcgtgttgcaaattcttccatccggacttgttctagagcatttttgactctgatcaccatttcgtcacgaggaatcccttggttctctagaccaaatgccacatcatcttctacagttgaaccgacaaattgattgtcgggattttgaaaaaccattccgaccattttacggatattccaaatattttcttcattaagcagcatgtctcccactgcaacgcttccttcttgcggtaaaatcaaaccgttgatcgttttggccaaggtcgattttcctgaaccgttatgaccgataagcgcaacccattctccttgctcaatggacaaagagacattcttcaacgccggacgatcttcttcggtataacgaacggtgatagcattcaattcaatgatcggcttcatgatatactccttcattccagttaattcttacttacactaccaaaaaagtaagttattttcaatcattccgatgagatttccaaacagaactttgttttcacttgccatgacctgtcaagacagatcatcgaaagtaaaaaaaaagcactttatgatgagtgcgtacacctcgaaatacatcgaggtgtaggcgctgagctagactcggaaagtttcttccaacatcataacactcttaataaacatctataaagtgatgataagtgtgattttaaacaagttctaggataaccattggtgcagcatctccgcgtcttggttctgttttcaagatgcgagtgtagccaccttggcgatctgtgtaacgaggagcgatgtcattgaataatttttgcaaagctgattcaataactacttcttcgttttcttcacgaacgctagcaacttcattacgaacaaatgcggcagcttggcgacgtgcatgcaaatcaccacgtttacctaaagtgatcattttttctgcagttgaacgaacttctttcgcacgagcttcagtcgtaacgatgcgttcgttaatgaataaatcagttgttaaatcacgcaacatcgctttacgttggctagatgtgcgtcctagtttacgataactcacgtggtttccctccttcactttcgtatgtcgtctcgatcagacgagccgaaactaacgtaatcgaagacgtattaatcgtctttacgtagtcctaaaccaagatcgtgtaatttcactttgacctcttcaagagatttacggcctaagttccgtactttaatcatttctggttcagatttattagtcaattcttgtacagtattgattcctgcacgttttagacagttgtatgaacgaacagacaagtctaattcttcaatcgtcatttccaacattttttctttttgtgtttcttctttttccaccatgatctcagcgtttttcgcttcgtccgttaggtttacaaagatgtctaaatgttcggtcatgatttttgcagctaaactcattgcttccaatggttcaattgagccatcagtccatatttccatcgttaatttgtcaaaatcatcacgacgaccaacacgagtattttctacttggtagttcacacgacgtactggtgtatagattgaatcgactggaagaacaccgattggcatgtcttcttttttattttcatctgcttgaacgtagccgcgtccaggtttcacagttaagcgagcatggaatgaagctccttcagaaacgttgcagatatacatatctttgttaaggatttctacatcactgtctacgatgatatcgccagcagttactgtagcaggtcctgtaatatcgatttccagggttttttcttcatccccgtacatttttaatgcaagacctttgatattcaagatgatttgagcaacgtcttcccgaacgcccttaacagttgagaattcgtgtaaaactccatcgatttgaatattggtgattgctgcaccaggtaaagaagataataaaatacgacgtaaggaatttcctaaagtagttccgtatcctctttcaagaggctcaacgatgaacttgccataatctttttcttcatcaatctttgcgattcttggtttttcgaattcaatcattcttatcttttacccctttcaaaacgaaaagtgtcttgttcaatgacgtaattgttacactcaaaatgagcagcactcattaaacacgacggcgttttggagggcggcatccattatgagggactggagtcacgtcacggattgcagtcacttccaaacctgctgcttgtaatgaacgaattgctgcttcacgtccagaaccaggtcctttaactgttacttctacagttcttaatccgtgttccattgctgctttggtagctgtttctgctgccatttgagcggcaaaaggagtagattttttgcttcctttgaaacctaatgaaccagctgatgaccatgctaatgcattcccatgagtatcagtgatcataatgattgtattattgaatgttgagtgaatatgtgcaatacccgcttcaatattctttttcacacggcgtttacgactcactttttttgctgccatgaagttttaacctccttcacttaggaattattttttcttgcctgcgactgttttagacgggcctttacgagtacgtgcattgtttttcgtgttttgtccacgaactggcaatccacggcgatgacggataccacggtatgaaccgatttccatcaaacgtttgatgttcaagttcacttcacgacgaaggtcaccttcaacttttaatttatcaacttcagcacggatagcatctgtttgttcattcgttagatcacgaacacgaacttcttcagaaacgccagcgtttgctaaaatttgttttgcagtcgtgttaccaataccatagatataagtaagtgaaacgaccacacgtttatcacgaggaatatctactcctgcaatacgagccatatttgttacacctccgattatccttgacgttgtttatgttttggatttgctgggcaaatcaccataacgcgtcctttacgacgaattactttacaatgttcgcacattggttttactgatggtcttactttcatgataatacctcctgtggttttacggagtacaattatttaaagcgataagtaatgcggccacggttcaggtcatacggtgataattcaaccgtcactttgtctccaggtaatatacgaatgtagtgcatccggatcttaccagaaacggtcgctagaacttggtgtccgttttccaattcgactttaaacattgcattcggcaaagtttcgacgactgtaccttcgacttcaatcatatcttcttttgccacgcacagtacctccttgtacttgtgattttcacacgataaaatggcggaaacggggttcccacctgatattctcaaactatgcttctacttaataacagtagaagtcggactgacatattttatcatactctgtcaaaggtttcaagagaaagttttgtagctgcaagtcggtgacgggcaatctatgattagtcaatgatgtttttaacatctttaaatacagcatcgatgtcgcgatcaccatcaatcgactgcaataaacctttttctttgtaataagctaagattggttcactgcttttgatattgacagctagacgatttttgaccgtctcaggcttatcatcttcacgttggtagaagtcatgacttccacaacgatcacatgttccttccacttttggcggattgaacaatttatgataagttgccccacaattgcggcacatgaagcggccggctaaacgttctacgagaacttcttcaggaacatgaatatcaatgacagcatctagttttttgtttaggtctttcaacatttcgtccaatgcttcagcttgttccaaagtccgcggaaagccatccaataagaagcctttctctgtgtctggttcagctaaacgctctttgacgataccgttggtgacctcatctggaaccaaagcgccttgatccatgtaagattttgctttcaggcctaattctgtttcgttcgccattgcagcccgaaacatatcgcctgttgaaatatgaggaagaccgtattcagcaacgatacgttctgcctgagtacctttaccggcaccaggtagtcccattaaaatgaggttcattctaattcctcctgtaagtttttgaatagtgttgaggaagacctcaacacttcaataactttaattgataaaaccagtatatttccgtttcagcataagtccttctagctgcttcgcagtatccagagctaccccgataacgatcaataaacttgttccacctaaaccgattgattgcggcaagttccaaaccatctgagcgatgatcggcaacagcgcaactagtcctaagaagaccgatcctactgtacttaatcgcataagcagacgtgagacgtattcttctgttcctttaccagggcgcacacttggaatgtagcttccttgtttttgtaggttttccgctaatttctcagggttaacttgtacaaatgcatagaagaacgtaaacgccacgatcaaaacagtatagatgatcgcaccaggtacggtgttataactaaaaatcgtttgtactacttcataccaagtttcgcctttgtacgaactacctaatgcttgaatgatcgcatttggtgttgtaataaacgaactagcaaagataactgggattacaccggcagcgttgaccttcaatggaagataactacttgttggcgcaccagctactcgcttcgtatattggattggaatctttcgttctgcttgttgtacatacgtcacaaatgtgatgatgaccaaaacagcaacgacaagcaagaccataaacaatgcattcatccaaatatctgatggatccacgttgatgaaataatcttctaccaattccttgatactagcgggtaagcgtgaaatgatccctgcaaagataatcattgacacaccatttccaattccgcgttctgtgatttgttctcctaaccaagtaacgagcatcgtacctgctgttaagatcaaaccaatcaccacaaacgtcgagatatttggattgttgacaaagccaagttgtgtataatagttgaaccctgcagttaacgtcatcgactgaacaaaggccaaaaccaatgttaggtaacgagttgcttgattcaatttcttacgaccaacttccccttgcttcgaccactcaacaaatcttggcacaatatccatctgcaacaactgaataacgattgacgcagtaatatatggtgacacacccattgagaaaatcgagaattgctgcatcgcgccaccgctgaccaagttcaacatgttcagaaacggtagatcagcaatttcccgcaaacggcttgcgtctacgcctggcacagtaatatgtgtacccagacgaaagacaaacaagataagtacggtgaagaaaattctcgatctaatatcttttactttaaaggcgtcctttagtagtttgaacattagatcacctcgattgatccaccagcagcaacgattgcttcttcagctgcttttgagaattttgctgctttcacagtcaatttcttcgttagttctccatttgctaatactttgattccagctttttcatctttgacgattccagcttcatgcaaagcaacaggtgttacttctgcaccgtcttcaaagcggtttaatacatcaagattgataactgcatattctttgcggttgacatttgtaaatccgcgttttggcaaacgacggaacaatggtgtttgtcccccttcaaagcctaaacgtactccgccacctgaacgagctttttgacctttttgtccgcgtccagctgttttaccgttaccagatgaagttccgcgaccaacacggttacgtacttggcgtgatccttctgatggttttaattcatgaagtttcataggtttggcacctccttaatcaaactagatctgctgatccttagacttcttcaacgtccactaagtgagaaacagtgttgaccatgcctttgattgcatcattagcaggttttactactgttgaattcaactttgtaagacctaacgcttttacagtatcgcgttggttttggggacgtccaataatactgcgttttaaagtgattttcaattcagccattatagtgtcctccttaaccgattaattcttctactgatttgccgcgaagtgctgccacttcttcagcgcgtttcaattgtttcaacccttcaactgttgcgcgaacaacgttgattggtgtgttagaacctaaagatttagatgtgatatccgctaccccagctaattccaatacggcacgaacgggtccaccagcagctaccccagaaccttctacagcaggtttcataaggatgcgtccgccgccgaatacaccgataacttcgtgagggattgtagaaccaaccattggtacttctaccaagtttttcttcgcgtcttcgattgctttacggattgcttctggtacttcttgtgctttaccagtaccgaaacctacgtgtccgtttttatcaccgacaacaactaatgcagcaaaacgtagacgacgtccacctttaacaactttagttacacggttaatcgcaacaacgcggtcttctaattccaaatgttttggatcaatataaaccatgaatggtgttcctccttctcttaaaattccagtccattttcgcgagctgcttcagctaaagctgctacacggccatggtaaaggtatccaccacggtcaaagactactactttaataccttttgctgctgcacgttctgcaactaatttgccgacagcttgtgcttgttcagttttgtttccacctgaaatttctttatctaaggcagaggcacttgctagcgtcacacccgctacgtcatcaatgatttgagcgtagatgtttttgttcgaacggaacacgtttaagcgtgggcactcagcagtaccagagattttgttacgtacacgacgatgtcttttctgacgtgttttatttttatctggttttgtaatcacaattgtcacctctttttatttgctagcctaagccgctattcgtaaatgcttacgactatttaccagttttaccttctttacgacgcacaaattcgccaacataacgaattcctttgcctttataaggttctggaggacgaacgccacgaatattggcagctaattcgccaacaacttctttatctgatcctttgatgatcacagaagtgtttgaaggaacttcaatttcgattccagctggcgcttcgatttcaaccggatgagagtaaccaacgttcaatacaagttttttaccttgcaattgagcacggtacccaaccccgatcaattctaacgctttttggaaaccttcagaaacaccaacaaccatgttgttgaagtttgcacgggtagttccgtggatagttttcatttctttactatcgtttggacgagtgaatgttacttcgtttccttcgatattcattttgatatcagaagaaaaagtacgtttcaattcacctttaggtcctttaactgtaatgtcgtttccatcttgtttgatttcaacacctgcaggaagaacgacgatcttattaccgatacgactcacttagaggcacctccttgtggattattttaaattaccatacataagcgactacttcgccgccaacattttttgctcttgcttctttgtcagtgataacaccttcagaagttgagatgatcgcgattcctaaaccgttcaatacttttggcacttcgtcagctttgacataagcacgcaaacctggtttagagatacgtttcaagtttgtgataacacgttcaccgtttttgccgtatttcaagaatacgcggatcacgccttgtttgtcatcttcgatatattcaacatcgcgaacgaaaccttcacgtttcaagatttcagcgatatcacgtttgatttttgaagcaggtacttctaagctttcgtgttttaccatattggcattacgtacacgcgttagaaaatctgcgattggatctgtcatgaccatgggataatttacctcctttatgcgagtatagtttaccagctagctttcttcacgccgggaatttgtcctttataggcaagttcgcggaagcaaatacggcaaagatgaaatttacgataaactgaatgtggacgtccgcaacgttcgcaacgagtatactcttgtgttgagaatttagcagggcgtttgtttttagcaatcattgattttttagccacgtagttcgcctcctttttttatttttggaatggcatgcctaattgtgacaacaattcacgagattcttcatctgtgttggctgttgttacaataacgatatccataccacgtactttatcgatcaaatcataatctacttcagggaagatcaattgttctttgattcctaatgtgtagtttccgcgtccgtcaaacgcttttttgctgacaccgtggaagtcacggacacgtggcaatgaaactgttactaacttgtctaagaattcatacattctttcgccgcgtagagtaactttcgcaccgattggcattccttcacgtaaacggaatccagcaatagattttttcgcttttgtgatcaatggtttttgacctgagatcaattgtaattcttcaacagctttatctaagttttttgcattcgatacagcatcaccaacacccatgttgataacgattttatcaacttttggtgcttgcataactgagctgtagttaaatttgtccattaatgatgggacaacttcttttgagtatttttctttaaggcggttcatctgttagcccctccttcctttatttgattatttatcaagaacttctccggtttttttagaaacgcggacttttttgccgtcaacttctttatagcctacacgtgttgcttcaccgttcgaaggatcaaccaccatcacgttagaaacatgaattggtgcttccatctcgacgattccgccttgaggagctgtttgagaaggtttttggtgttttttaacgacgttcacaccttcaacaacgactttgtctttcttaggaaacgctgcaagtacaacgccttctttgtttttgtctttaccagtgataactttaactttatcgccttttttaacaaacatgtttgtttcgcacctcctttagataagaatcactattacaatacttctggtgctagggaaacgatcttcataaagttgccttcacgcaattcgcgagcaactggtccaaagatacgagttccacgtgggctcttatcgtcacggataataaccgcagcattttcatcaaatttaatgtaagaaccgtctgtacgacgtgctcctgattttgtacgaacgataacggctttaacgacgtcaccttttttgacaaccccacctggcgttgcttgtttgaccgtagcaacgatcacgtcaccaatattcgcagttttacgaccagatccgccaaggactttgatcgttagaatttcacgggcacctgagttgtccgccactcttaatcggctttctgcttggatcacgatgtgtatcctcctttcagattttgcaattcacaatctatataggaaaatctcgtgtgattagataatcactgccttttcaacaatctctactagacggaaacgtttcgtagctgataatggacgagtttccataattttcacgatatcgccaacttttgcttcgttgttttcatcgtgtgctttgtatttcttagaatagttcagacgtttgccgtagatagggtggtttttcttagtttcaacgacaacagtgattgttttatccatcttgtcggataccacgcgaccttggtaaactttgcgttgatttctttcttcagtcatacgctaaatggcctccttccactattactttgcttgttcacgcaatactgttttgatgcgtgcaatcgatttacgtacttctttgatacgtgcagtgttttctaattgtcctgtagctaattggaatctaagattaaacaattcttctttcaattgtttttcttgatctagcatttcggcagtggttaattctctgatttctttaaccttcattcgattcaccacccatttcctcacgttttacgatctttgttttcactggcaatttgtgagaagcaagacgtaacgcttcacgcgcaacttcttcgggaacgccggcaatttcaaacatgattttaccacgttttactggtgatacccatccttcaggagcccctttaccagaacccatacgtaccccaattgctttggccgtataagatttgtgagggaaaattttgatccatactttcccgccacgtttcatataacgagtcattgcaatacgggcagcttcgatttggcggtttgtgatccagtgtgattcaacagcttgcaagccgtattcaccgaaaactacttcttttccgcctttcgcttcaccgcgcattttcccgcggaattcacgacggtgttttacacgtttaggtactaacatgtttatttccctcctttctcagtgttctttttagttggaagaatttctccacgataaatccacactttaactcctagttttccgtatgttgtatctgcttcttcccatgcgtaatcaatatccgcacgtaatgtatgaagtggaactgttccttctgaatagccttctgaacgagcgatatctgctccgtttagacgaccagatacttgtgttttgattcctttagcgccagaacgcattgtgcgttggatcgcttgtttttgcgcacgacggaaagcaacacggttttctaattgacgtgcgattccttcgcctactaatttagcatctaaatctggttttttgatttcaacgatgttgatgtgaactcgtttgccagttaatttgtttaattcttttcttaggttttcgacttcagatccgcctttaccgataaccatacctggtttagctgtgtggattgaaatatttacgcggtttgctgcgcgctcgatttcaattgttgacacagcggcatcagcaagtttagatgcgataaatttacggattttcaaatcttcatgtagaaattcagcatactctttttcagcataccattttgcatcccagtcacggatgatgcctacacgcattccaattggatgtactttttgacccactgattgtccctccttatttttctgatacgactacagtaatatgacttgtacgtttgttgattggagaagctgaacctttcgcacgtggacggaaacgtttcattgttggtccttcgttgacgaatgcttcagaaacaatcaagttttcaacatctaagtcaaaattgttttctgcattagcgatagctgacatcaagactttctcgatgattccagccgctttgtttggtgtgaacttcaagatcgcgattgcttcagcaacgcttttccctctgatcaaatcaataactagacgtgatttacgaggagaaacgcggactgttttagcagttgctttcgctgatgtgatttgttctgccatttttggatatcctcccctcaaaattagcgtcttgttttcttatcgtcggcagcgtgtccgcgataagttcttgttggtgcaaattcacctagtttgtgtcctaccatgtcttcttggatgtaaactggtacatgtttccgtccatcatacacagcaattgtaaatccgataaaacttgggaagattgtggaacgacgtgaccaagttttgatcacttttttcttttcagcgccttgttgtgcttcgaccttcttcatcaaatggtcatcgacaaaaggtccttttttcaaactacgacccatggtgtacctcctctcaaaatgtgcgacacatggtcaagtaaattatttagtcttgcgacgacgaacgataagtttgtctgatttagctttcttgttacgtgttttgtaaccaagtgctggttgtccccaaggtgaaactggagctttacgtccgattggagctttaccttcaccaccaccgtgtgggtgatcattagggttcattacgctaccacgtacagttgggcgtttgcgcatccaacgagaacgtccggctttaccgatgttgatcaattcatgttgttcgttaccaacagagccaattgttgcacggcatgttgccaagatcatacgtacttcgcctgagttcaagcggatcaatacatattttccttctttaccaagtacttgtgcacttgtaccagctgaacggatcaattgtccgccttttcctggtttcatttcgatgttgtggataacagtaccaactggaatattttctagtggtaatgcgttccctactttaatatctgcatctggtccagaaacgacagtcatgccaacttctaatcctttaggtgctaagatatatgcttttactccatcctcgtaatgtactaacgcaatgttagcagaacggtttggatcatattcaatcgttttaacagtagcaacgacattgtctttgttacgtttgaaatcgatcaaacggtattgacgtttgtgaccgccaccttgatgacgaaccgtgatacgtccgttgttgttacgaccagcattgtttttcaatggcgctaacaatgttttttctggtgttgaagttgtgatttcagcgaaatcagaacttgtcatattacgacggccgtttgtggtaggtttgtactttttaatcgccacgtctttttccctcccatttagtatttaaatatggtctgcttattcagcagcgtcaaaaatttggatttcttttgaatcttcagttaaagtcacaacagctttgcgacgtttttttgtgtatcctgcatatttacccatgcgtttgaatttagggcgtacgttgatgatattcacgttagccactttcactccgtcaaaggcagtttctacagcttgttttactaaagttttgttcgcttttgtgtctacttcgaaagtatatttcttgtcatccatggcaagcatagatttctcagtgatcactgggcgtttgatgacgtctagtaagttcattatgcaagcacctcctcgatctgagtaagagcagtttgtgttaccaacattttatctgctgaaacaacatccaatacgctcacgttatcagcagttactactgaaacagatggcaagttgcgtgcagataatgcagcaaagtcgttttctgtttctaaaactaccaatacttttgagtcaatagtcaagttagctaaaacttgtttgaattcttttgtttttggtgcatcaaagcttaacccttctactgctaccaagttatttgaagcaactttttctgacaatacagatttcattgctaagcgacgaacttttttaggaagtttgtagctgtatgaacgtggtgttggtccgaagactacgccacctccacgccattgtggtgaacggattgaaccttgacgagcacgaccagttcctttttggcgccatggtttacggccaccgccacgaacggcactgcgatttttcacagcgtgtgttccttgtcttaatgaagcacgttgcatgatgattgcatcgtagacaactgtttcatttggttcaattccgaagatttcttcgttcaatgtaatttcgccattttggcttccatcttgtttgaataatgctacattcggcattccttagttcctcctttcttcctatctacttatttagctttcacagctgatttgattgtaatcaatgattttttcgcgccaggtacattacctttaatcaagataacgttacgttctgcgtctacacgcacgatttccaagttttggatcgtgatgcggttaccgcccatacgtccagcaagacgtttgtttttgaatacacggttaggtgcaactggacccattgatccaggacgacggtgataacgagaaccgtgagccattggtccgcggctttgtccgtgacgtttgataacgccttggaatcctttacctttcgaagtgccggttacatcaatgatgtctcctgcttcaaaaatatcaactttaatttctgaacctacttctaagccctctagctctacattcttgaattcgcgaatgaagcgcttaggagccgtgtttgcttttgcaacatgacctttcgcaggtttgttagacaaaacttcacgcatatcttggtagccgacttgaattgcttcgtagccgtcattttcgattgttttcacttgtagcactacgtttggagtagcttctactacagttactggaatcaattcgccagattcagtgaagatttgagtcattcccacttttttccctaagattcctttggtcatgattacacctccatcttaattattatagtttgatttcaatatttacaccgcttggcaagtctagcttcattaaagcatcaactgtttttggtgttggattcacaatgtcgattagacgtttgtgtgtacgcatttcgaattgttcgcgtgaatctttgtatttgtgtgtcgcacggatgatcgtgtacaagctgcgttcagttggcaatggaattggaccagatacgccagctccagttctttttgcagtttctacgattttatccgctgattgatctaaaatacgatgttcatacgcttttaaacggatacgaattttttgttttgccattgttttccctccttcgcctattttgaaaagtagacatagctccacgaaaatttccgtcacgctcgtccatggcaaagcgtccgggcgtgtcgcaacctctcgtttcgtagccggcagttttttctttgctgccagtgtgacttacgcatatacgtaaacagcacctttatgattatattatggataaacgctgattgcaagctttttttaatgaaaagaaacgattcttttgcgtttttttcagaaaactttcttttctcttgaaaacaacaaaaaccttgcctaatgacttgctctaagcaaaagcttttccaacaaccatagctactaacgcaaaagcgccccttccggaataattctccagaaaaagcgcttcaaaccactaatcatctcgatttactactagttgattaatcctttagtcacacgttggattgctgcttttaacggaaaataagcaatagcgacaatcaaaatcgtggccactacattgatgactgttgccggcaatttgatgaccgctgccgaccaagctcctgaccagctgctgccaagataccaaagcataacagtatttttgatttgcgtcatagcaagtttcgccaagccagtaacagacccaataaccactaactgccatattgcttgcggacgttttttaaataagagaaacgcaccatatgcaaaagcccccacaataaaactttccaaaataaaataaggggcctctgtcgcatacccattcagcaaatcaaaaatcgcaaagcccagtcccccagcaagggagcctttcacataacctaataataaaactgctaataaaagaacggcattccccaagtgcacaaaggcgccggtgggcaatgggatcttgatcatcgtaccaatgactgtcaacgctgtaaacaatgccacaaagacaatacttcgaattctgtgatcattcatgtggtatcatcctttcttccgcatgattataagcaccgtgccagacgtgaccgacataaggattgatcagaaccccttgtcgaatcgccgcaacgacgaagtctttggccaagcgaatgctttctagtaacggcagcccttttgctaatccagcagtaatggctgcagaaaacgtacagcctgcaccatggttgaaatcagtatcgatcctccggctttctagagtagtaaaagagtgtccatcataaactaagtcaattgcctgcgctcctggcaaccgatgacctcctttgacgacgacacacttcgcgcctaaatgataaatccttttcgcagcttctttcatagcaacaaggtcttttaagtcccccatccccgataaaattccagcttcaatcaagttaggtgtcaccacatccgccaaaggcagcaagtattcgatcaatgcatccacactctttggctgcaaaatatgtgcggtccctttacaagcaataacaggatcgatcaccacctgtttcacttgttgttgctggatcatcttggcagcctgcgcaatattggcttcattccccaacatccctgtcttaacggcatccattggttcccccgtgaaagccgaaatcaattgtttttcgaccaaagaagtgtccatagctgtcacttcgtgggtccatcccattgacggatccatggtgacgatcgaggcaatcgaagcaaaaccaaaaacaccatactcttgaaaggtctttaaatcagcttcaattcctgcgccgcctgttgaatcggacccggcgatcgttaatactttcttcattattatcgactccttttattcagtataaccaatggtccccttgacgaaaacagccaattggcttatttttataccatccaataaaaaaaggagggctctaatgaccgataggcaaatcgataaacagaagaagcaaccactctatcagcaaatcgtcacttactttatcgaggccatccaaaatggcgattacacacctggtgaacagttgcccgccgaacgaaaactagccactcaattcggggtcaaccgttcaacgatcgtcaaggcactggatgagcttcggagtttaggatggatcacgcgcaaacgaggcagcggcacacaagtctctgaaggtcgatggggcaaccgtcagacccctctgtcttatctccgatcgtctctatctagtccctacttacagcaagacccctttgttgaagagattcagcgattgcgcacaaaagaccaaattctcgacctttatacaggtgatctgccacaagaactgcttcctgatttccaatttcctgcctttacttgggagatgatccgcaacgaaagcctgcaaagcaccccagccggctatccaccattgcaagaagtcttgatgcggcacttgacggaagatttcggaatccccttatctggacaaaaactcgtgatcacttctggctccacgcaaggtatcacactgcttatgcaagttttgttgacttcaggtgatagtattcttacggaagatccttcctttttgttttcattgcccttatttacaacaatgaatgtccgcgttctcggaatcaaacaggacgaagaagggatgcgaccgaaagacttagaacaagcattgaaagagcagaaaatcaaatttgtttatttaaatccgacattccaaaatcccaccggtcgtaccatgagccttggccgccgcaaagaaattatcgctatttgccagaggtatcaagtaccgatcatagaagatgatatctttagtgagttagcctttacgccgcaacccgaaaaatttaaggcactagcaccagattcggtcatttatctcggatctttatcaaaactctttgggtcttctatcaaaatcggctggttattagctcctgaagcattggcggatcaatttgctcaagctaaaaaaaggatgtctatcgagacaacgatttttcctcaactgttagctaatcttgctctccgttccatggagtaccctcaacaacaacaggacttgctaaaacagatggctcaaaagcaacatgccttgattcagcgactggacgctttttctgaggattgggcattccaacagaccactgggggactatacctctggctgcaatggcaacacgccccactgaaacggagagactggacacttttcttaaaaaatgattgtctagttgccccagcctttctcttcagcaatgatacaaacggatttcgtctgaactatacacgactttcggaaaatcaactagacttgttttgtcagcaattcagaaaaatcacaacacaattaaaggagcatctgtatgaatgagacaattgatctattaaccaaccaccgcacttatcgccaattcgatagcaactatcaattatcaaaggagcagttagaagcaattttatctgctgcacgacaagcacctagctggatgaacgggcaagcttattccattctcgtgatcgatgatcgttcacttcgacaacagctggttacttggaatccaggtaatcctcatatcgctgaaagttctatctttttacttttcttggctgatttaaaccgcaccaagaaagttgctgagaaaaaacaaacaccttatctggttgatgaaggtctacaaccattgttgatcgcaacaaccgatgctagtatcgctttacagtcagctgccattgctgcggaatctcttggtctaggaacagttatttccggcagtgtccgcaaagacagcaaagcgatcgccgaattgctcgaactgccagaatacgtttaccctgtggctggattaagtattggcaaaccaattgtagatatggctctcaagcctcgcttgcctcaagaggcggtaatccattacaacaaataccaggattattcctatcaagcgatcgaagactatgaccaaatcatgaccgccttcggtgaagcgagagaaacaatgccttggtccgaaaaattcgccaatttctacggccgtgtccctgaccaaggctttgatcagtttctaaaagatcaaaaattgatcaaataaaaattttcaagcaaaaaaaagcagaagcgctagcgcttctgctttttgcatttatcaagtcaattaagctttgatttcagttacaacgcctgaaccaacagtacgtccgccttcacgaattgagaaacgagttccgtcttcgatagcgattgggtggatcaattcaacgtcgattgttacgttatcgccaggcataaccatttcagttccttctggtaattcaacaacaccagttacgtcagttgtacggaagtagaactgaggacggtagttagtgaagaatggagtgtgacgtccaccttcttcttttgtcaaaacataaacttcagctttgaattttgtatgaggtgtgattgtaccagctttagccaatacttgtccacgttggatgtcttcacgagcaaccccacgtagcaatgcaccaatgttatcccctgcttcagcatagtctaacaatttacggaacatttcaacacctgttacagttgttttagcagtttcgtcagcaataccaacgatttctacttcatcaccaacgcgaacttgtccacgttcaacacggcctgtagcaacagtaccacgtccagtgattgagaatacgtcttcgactggcatcatgaatggtttgtcagtatcacgttctggagttggaacgtattcgtcaactgcagccatcaattccatgattttttcttcgtatgaaggatctccttcaagagctttcaaagcagaaccggcgattacaggaacatcgtcgcctgggaagtcatattcagacaataggtcacgaacttccatttcaactaattctagcaattcttcgtcatcaaccatatccattttgttcaagaaaacaacgatgtatggtacgccaacgttacgtgataacaagatgtgttcacgagtttgaggcataggaccgtcagcagcagatactactaagatcgcaccgtccatttgcgcagcaccagtgatcatgtttttaacatagtccgcgtgtcctgggcagtctacgtgagcgtagtggcgagcttcagtttcatactcaacgtgagcagttgagatagtgattccgcgttcgcgttcttctggagcaccatcgatttggtcgtaagcagaagcttgtgccaaaccttttttagataatacagttgtgatagcagctgtaagtgtagttttaccatggtcaacgtgtccgatcgtaccaatgtttacgtggggtttagaacggtcaaatttttcttttgccattttaaaatgttcctcctaaaaatacagtttattttttatatttgataggtagagggcgcgaagccccccatcccttatcatcgataatattgtacacgaaacttcataaaaaatatagctttttactgaatttcgcatttgtgcatcaattattcagctttgccgccgtttttcttgatgatttcttcttgaacagacttaggtacatcttcatagtgatcaaatgtcatcatgaaagtaccgcgtccttgagtagatgaacgaagtgttgttgcatatccgaacatttcagccaatggaacaatcgcgttaacgatttgtgagttaccatgcgcttccataccttcaacacgtccacgacgagcagttacgtgtcccataacatcacctaagtaatcttcaggaacagtgataacaactttcatcattggttcaagaatcactggattagctttcttcgctgcagcacgtaaagccattgaagctgccacacggaaggctgtttcacttgaatcgacatcatggtatgaaccatcgtaaagcttggctttgatgtcaaccaatggataaccagctagaacaccgttagccattgagtcttcaagtcctttttcaactgctgggatgtattcacgtggaaccacaccaccgacaattgcgttttcgaattcgaagcctttaccttcttcgtttggtgtaaattcgatccatacgtgaccgtattgacctttaccaccagactgacgtacaaatttaccttcggcttgcgtagaagcacggaatgtttcgcggtaagaaacttgaggcgcaccaacgtttgcttcaactttaaattcgcgacgcatacggtcaacaaggacgtccaagtgaagttcacccatccctgcgataacagtttcgccagtttcagcgtttgtttctacacggaatgaaggatcttcttcagcaagtttttgtaaagccacacccattttatcttggtcagcttttgatttaggttcaacagctacttcgataactggttctgggaattcgattgattcaaggataactggtgatttttcgtcacacaatgtatcccctgttgttgtatctttcaaaccaacagctgcagcgatatcgcctgaataaactgtttggatttctgcacgagtgttcgcgtgcatttgcaggatacgaccgatacgttcgcgtttgtcttttgaagcattcaagacatatgatccagagttcaagacacctgaatacacacggaagaatgtcaaacgacctacgaatgggtcagtcattactttaaatgctagtgaagcaaaaggcgcttcatcgtcagcaggacgatcagtttcttcgtcagttttaggattgatccctttgattgcaggaacatcaagtggtgaaggaaggtagtcgatgactgcatccaacatcaattgaacccctttgtttttgaaggctgaaccacaaagaactgggaaaaattcaacagtcaatgtcgcttgacggataccagctttcaattcttcttcagtgatttcttcaccttccaagaatttcatcattagctcttcgtcagtatctgcaacagcttcaactaatttttcgcgccattcttcagctaattctttgtactcttcaggaatttcagtttcttgaatctctgttcctaaatcgtttgtatagatctcagctttcatttttactagatcgatgataccagtaaagtcatcttccgcaccaattggtaattggattggatgagcatttgcttgcaagcgatcatgtaaagtagatacagagtataagaagtctgcaccgattttatccattttgttacagaatacgatacgtggtacgcggtaatctgtcgcttgacgccaaactgtttcagtttgtggttctacaccagattgtgagtccaatactgttacagcaccgtcaagaacccgtagtgaacgttgtacttcaattgtgaagtccacgtgtccaggagtgtcgatgatatttacgcggttttctttccattgcgcagttgtcgcagcagaagtgatcgtgatcccacgttcttgttcttgttccatccagtccatttgagaagcaccttcatgtgtttccccaattttatggattttacctgtgtaataaaggatacgttcagttgtcgttgttttaccagcgtcaacgtgggccatgatcccgatattacgagttttttctagcgaaaattctcttgccattctaggttgttcccctctcattcttacttaaacctaagctaaggttgtctcagtaccttccaataaaaagcagtgaggatcttaccaacgatagtgagcaaatgcgcggttggcttccgccattttgtgtgtgtcttcgcgtttcttcacagaagcaccagtgttgtttgctgcatccatgatttctttcgcaagacgttcttccattgtgtgttcgccacgcaaacgagcgtagtttaccacccaacgaagacctagagttgtacgacgttctggacgaacttcaactgggacttggtagttagaaccaccgacacggcgagctttaacttccaatacaggcataatgttcttcattgcttgttcgaaaacttccaatggatcatttcctgtagattctttgataatgccaaaagcattgtagataatatttgcagcaacaccgcgtttaccatcaaccattacacggttgatcaaacgagttactaattttgagttataaataggatctggtaaaacatcacgttttgcaacaggacctttacgaggcatccgtaactcctccttccgaaatatcagttctgattaaatagtttcatttgtagtttgaatcaaaattaagctttaggacgttttgttccatatttagaacgagattgtttacgatcgttaacaccggcagtatccaatgcaccacgaacgatatggtaacgtacccctggtaagtcttttacacgtccaccgcgtagcaataccacactgtgttcttgcaagttgtgaccgatacctggaatataagctgtcacttcaatcaagtttgacaaacgaacacgcgcatatttacgtagagctgagttcggttttttcggtgtcatagttcccacacgagtagctaccccacgcttttgaggtgagttaacattcgtttgagcttttttgaaactgttgtatcctttgttcaatgctggtgaatttgatttttcaaccttggatttacgaggtttacgtactaattgattaattgtaggcatccctagttttcctccttccttgattcgctttatagttccacacatccaggtggttctttttttgcgataaaaaataatgcattctctgcattcttatcaaatatgctttgataaacagtcagcacgtctccaacgagagacctgtagataaagcacctttgatagaataccatgataaaaagactctgtcaaccatctctccaatgattttttatgaaaggagtaactgccaaaattttataaaaaaactctcccttgcgcctcctttttacttcttcttactatataataaagatgaaaatagtattttattagaggtgggtcaataatgaatctaaaagagatggtcggtattgaagcggccagctatgtcactgacggtatggtcgtcggtttaggaactggttcaactgcgtattacatgatcgaagaattggggcgcagagtgaaagaagaaaacttgtcgatcgttggtgtaccaacatcctgggcatcaaaaaaacaagcagaatcgttagggatcccggtcaaaacgatcgatgaagtggcaagtgtcgatttaacgatcgatggtgcagatgagatcagcggagactatcatggaatcaaaggtggcggtgccgcactgctttttgaaaaaatcgtcgcaacctactctaaaaaagttctttggattgttgataaatcaaagatcgttgaaaaattaggcgcattcccattacctgtagaagtgattccctatggcagtcagcaattgatgcgattgtttacagaaaaaaactatcaccctgtccttcgcctagccgaagatggcaccccgctaaaaactgattgcggtcattacatcattgatcttcatctacaaaccatcaatgaaccagttgcattggctcatgaactagatcaaaccgtcggtgttgtagagcacgggctcttcttggatatggtccatacgatcatcattggacaagaagatggacctgagacccgcagcgttcgctgatgcctctagcaacaaaaggagcaagtgctccttttgttcgaggttctacgtatttttcttcatttttctagagttaaattcatttttgtgcaagttttctctatcatttatgcctcatttatgctacattcaaataaaaaagaataggaaggagcggctatgaaagtcatcggttatgctcgcacaacaattattgataaagaatcaagtgaacaattaaacaaactaaaagaatttggttgtacagaattgttccacgaaacctatgcctacgaagaaaactgtgataaccactcattagaatctgtgattgctcgtatgcagtctggggaaacgctggttgtttctgaacttcatcgtttaggtaaaacaacccggcaattaactgaattgacagatcttctaagaaaaagaaaccttcacctagtttctctagcagaaaacatcgatacgagagaacccatgggggcgatttatttcaatttaatggaaggtttggcagcgatggaacaagccttaatcaaagaacggacattagtcggattgaacaatgcccgaaagaacggcaaaattggcggacgtccaaaaatcgatccaaaaaccatcaaaaaaattcgccagctttattacaataaaaaagagacgattcaattcatctccacaaaatgcggtgtttctgtcggaacctgctataaatacataaaactttcagaagaagaattggataaagtatacagtcattaatcacttgtctgaatccggtgcttcatctttttttctgtgcgccgatcctgtcagacaaaatgattcagaaataaaaaagaacgtcttgaagaaagacgtttttttctgtttctttttttaagaaacaaggttttacgctaaatacgtagaaattctttgcgaaaaagtgtacaataaacagggaattgaaaatttcagaaaaatatctaatatctaaaaggagagttttacatgccaaaattagtattttctcgtcacggactaagcgaatggaataaattgaaccaatttactggttgggccgatgtagatttagcgccagaaggtgtcgaagaagcaatcgagggcggacgtaaaatcaaagaagccggcatcgaattcgatgttgcctacacatctgtattaactcgtgccatcaaaacttgtaactacattttagaatattctgatcaactatgggtgccaacaatcaaatcttggcgtttgaacgaacgtcactacggtaaactacaaggattgaacaaaaaagaaactgctgaaaaatacggagacgaacaagttcacatctggcgtcgttcctacgatgtattgcctccattgatggatgcatctgatgaaggttctgcagcaaacgatcgtcgttatgcaatgcttgatcctcgcgacgtacctggcggcgaaaacttgaaagtaacgctagaacgtgcattacctttctggcaagatgaaatcgcacctgcattgaaagacaacaaaactgttttagttgccgctcacggaaactctctacgtgcgttagcaaaacacatcgaaggtatctctgatgaagacatcatggatcttgaaattccaacaggtcaaccacttgtttatgaattgaacgatgatctaacagttgcgaaaaaatattacttataatcattaacagccaaggctgtgctgcaagtcagagcaagagtattcttcctgactgacggcacagtctttttttgattggtttcctgagaaatattcgttataattgaaaccgcatacgaaaggagcttggaatgatgaccacactctgtaaaaatgatacgctactatttcttggagatagcatcaccgactgcggccgtgatcgactcgatgctacggatctgggaaaaggattttccgcctttgtggcagcccatctagctgcagaatacccagatgcaaacttgtcatttgttaaccgcggcattagcgggaataaaattcgcgatatcttaaatcgcatcgaggaagactgcattgatttaaagccagatctactgattttcttgatcggtatcaatgatacctggcgcaatattggcacctcctctttcggcacacccgaagcaactgcgacatttgctagtgattatcggcaatttttgcagcaagtgaccgaaagtgggatcaagaaaatcctgcttttagagccatttgttcttccttatccagcagatcgcaaacaatggcggaaggatttggatcccaagatccattccattcgtgaactagctgctgaatttggttgtgactaccttcctttagacggcttattcgctgaacgtactgtcaaaaaacattcatcttattatactggggaagatggtgtacatccaacaatcgccggacatggtgtgatcgcacaagagatcttgcgccgtatccattattcaagataattctttgatagaagtacgcagacaaataatcggtaggataccaattaccctaccgattatttgtctattctgtcaggatttcttcatttagagatactctgaaggggtcaaagcctcttgataaatggcaatgacatcagattctgtcaacggtacgtaggcatttgtcgcaattgaactaaatgctactgcttgtttggccatttcttcaaaatgacgatcatcttcgatccccacttctggtaaagtcattgggatcccacaagcaaggaagaaatcgtataacttttgaatccccatccgagctgccatttctgggaccgcttcttctacttggaatacttcacgggcaaagcgagccaacttaggtgctgttgtctcattcaacacatgaagcatccagcggggcgtcaagatggctaagccgatcccatgagtaatatcataaaaagcactcaactcatgttccattggatggcacgaccacgcaccggctttcccactacctgtcaacccatttaacgccaatgtacttgcccacatcaagtttgcccgagcatcatagtcatctggggtatccaaaacaatcggcaagtttgtgattaccgctttcaacagcccttctgcgatgccgtcttgtacatccgtattctctgttgtactaaagtagttttcgatcagatgactcataatatctgcagaaccagccgctgtttgatagcgattgacgctaaaggtccaggtgggatctaagaaagaaaccttcggcaagaaattaggaccgtggacccctaatttttgtttcgctgtaaggttcgtgataactgctccccgattcatttcactaccagttgcagctaatgtcaaaaccgtaactaatggcaatgctggcccttggtagctgcgtttagtcactaaagtccaaggatcttcctcactgcaagcagcacctgcgatcactttgctgcaatcaatcacggagccgcctccgactgcaagaatcacatcaattttttcagtgcggcagagttctgccccttttgctactgtttcaatccgagggtttggttcaactcctgctaattctgttacttgattgtcattgttttgcaattgcgccatgacttgatcataaagtccgctttttttgatactgccgccgccatagaccaataggacattttttccgaaagtattcaatacttccggcaactcatttaaccgatctttcccaaaacgtatatccgttgtcacctgaaaagtaaaattattcatgctccaacctccttttctttaattaaaccattttcgtccaaaagtgcaactattccaactagctagaaagattcaatcaatcatttaacaaaaaatcactttctgactggctcccattgtctaaggagtcaatcagaaagcgatacaggaataaaaaattttttgtaggctgtaggataagaaaaaggattaggagatagctgtttctaagccaactttgatcatatcattgaatgttgtttgtctctcttccgctgttgtttcttctccagtgatgatatgatcactgactgtgcagatcgctaaggtctgtacgtggaattttgctcctaaatagtaaagcgcagcggcctccatctcaacacctaatacaccaagatcagccaattccactgtttctgccatatcatctttatagaaagtatcttccgataaaatgttcccaacgtgggtggtaaagccggatgcaatcgctgtatcatacgctttacgcaacaagtcgaaatctgcgattggcggaaaatgaaaactttgaaagttctttgctaccatggaagaacttgtcgctgcagcttgggcgatcactaagtcccgaacatgaacatctttagaaatcgcgccacaagtgccgacacgaatcaatttttttacgccataagaattgatcaattcatgggcataaatggtcgcagaaggcatccccataccagttccttgtactgatactcgctcacctttgtagacaccggtataaccgagcatccctcggacattgttataacagatcgggtcttctaaaaatgtttctgcaatgtattttgcgcgtagaggatcgccaggtaataaaatcttatcagcaatctcgccagcttttgcttcaatatgaacgctcatcttttcgctccttttctacttctcttttatgctctttttttagggtttgcttgttttacagattcgctaaagtttctttgatcagcgctttaaattcggctttgacccgttctgttgtctctacgacttcttcatggttcaggcttgcttgcataccagcagctagattggtgatacatgaaacgcccaacactttcaagccactatgaacagctacgattacctcaggaaccgtcgacatacccacagcatctgcaccgatcgtacgagcaaatcgaatttcagcaggtgtttcataagtcggcccagaaaagcccatgtaaactccttcttttaagtggagaccttttgtttctgcaatttgttttgctgtttcccggtagcttggatgataagcctggctcatatcagggaatcgtggtcccatttcttcttcgttagccccaatcaatggattgtcccccatgaaattgatttgatccgtgatcaacatcaaatcaccaggttggaaactttcattcactccgccgcatgcgttcgtcacaacaagtgaatgtgcttcaagggccgccattactcgaacagggtaagtaactgtctgcatggaatgtccttcatagtaatggaaacgaccttgcatcgccaatactttttttccagataatgtaccataaactagttgtccggcatgcccgacgactgttgaaactggaaaatgagggatatcgttataaggcagcacaattggattttcaatctcatctgctaattcacctaatcctgaacctaagatcaaaccaaaatcaatagatcctacccctttttccttgatgaatgtcgttgtttcctgcaatttctcatgtaatgttgtcatttctccacctctaatttaaatgatttaagaagctttccccattttctgttgccggtactgcaaagttttctgcaattgttgctgaaatatcggcataatggccttggggtagttggccttgtcctttaaattgtttgctgtaaaccaataatggtacatattctcttgtatgatcagtcccagtaaaggttggatcatttccgtgatcggctgtgatcattaataaatcatcgtcagccatggcatccagaatctctgggattcttaaatcgaaatcttcaatggcatgagcataaccgacaacatcccggcgatggccgtaaagcgcatcgaaatcaactaaattagtaaaacttaggccggtaaagtcttgcttcatcacattcaatagctgatccacaccatccatattgctctttgttcttactgaatcagtgattccttgaccattgaagatgtcattgatctttccgacagcgatgacgtctttgccagcatctttcaacgaatccaacactgtgtgtccaaaaggatccagtgcatagtcatgccggttgcttgtccgggtgaagtttcctggttcaccaacataagggcgagcaatgatgcggccgatcatatatggttcatctttggtaatatcacgcacatattggcaaatgcggtacaattcttccaacggaatgatttcttcatgagctgcaatttgcaagactggatcggcagacgtataaacgatcaaatcgcctgttttcatttggtgttcaccgtaatcatcaatgactgctgtaccggaataaggtttgttgcagacgattttacgtccagaaaattcttcgatttgttgcagcaattcttgaggaaatccgtcaggaaacacacgaaacggtttttgaatattcaaacccatgatttcccagtgtccagtcatggtatcttttccgacagagatttcttctagtttcgttgcatagccgtcatggtctgctacatttttgacaccatccagcggtcggatcgtaccaagacctaactgttccaaatgaggaatcgtcaatccagcttctttggcgatatgtcctaatgtatcagaaccaacgtcaccaaatttttctgcatcgggcgcttcaccgatacctacagaatccattacgatcaaatgtacacgtttaaacattcttttccctactttcttttattgttattcttttcttatcatactagaaataagaaagatttgcctttaaggatgtttgagatattgggtttcttgctgctacacaaaaaaaagggcagggcacagcaacacaaacatgtcccatagccccaccctttcatacagaaaaaattatttagatttgatgtagttcttaccgttagctttaggtcctgccgctttcccaaggaacagcactagaacaataattgttaacgcatatggtgctgcttgtagataaaccgctggaatggaggaaatgattggcaattgtccgccaacgatactgatgttttgcgcaaagccgaagaaaattgcagcgcccatcgcacctaacggattccatttaccaaagatcattgctgccattgagataaacccttgaccggcaatcgttgttacagcaaaacgtccagcgattgattgggcaaataacgcgccacccattccgcctaggaaaccggagatcaacacgccagaatagcgcatcacatagacattgattcctaaggtatctgctgcctgagggtgttcacccacggaacgtagccgtaagccaaatcgtgttttaaagatgacaaaccaagcaatcacagaaatcaagatcgcaaagtaagcaggtaaaaacgtttggttaaagaagactggaccaatcacaggaatatcacgcaacacaggaaaattgaaataccctaatgtttgttgaatattgtctgtttgccctttgttgtagatggctttaactaagaagacagccagcgctggcgccatcaaattcattacggtaccactgataatgtgatctgctctaaagttgatggtggctacagcatgcagcagtgagaaggccattcctactaacccgccgactagcattcctaaccaaggtgtccatgcaccaaattgtgacgcaaattcaatattgaaaacgatcgaactgaaggcacccatcaccatgattccttcaagacctacgttaacgatcccgcttcgctctgagaaaacgccgcccagtgcagtcaggatcaatggtgcagcataaatcaacgtttgtgtgacgatcgaagaaattaaactgatattcattagatggttcctccttcctgatcttgattatttggctttgcttcaatttcttggacaacagcgacttcctttttgccatcaaagattttagctaatacaaaacgaatcacgtagctgatcgcaacgaagaagatgatgatcgcaatgtcgacatcaacaagttctgaaggaatccctgcaaactgcattccttgtccgcccagtttaagaacactgaacagcaatgcagaaagtaaaatcccaatcgaagacccgctgcctaataatgagactgccatcccatcaaaaccaatactcaatgacgaaccttgaacgaagaagttttcaaaagttcccaaaccttgaacgacgccacctaatccagctaatgttccagagatgatcattgaaataatgattgtccgtttgctgctcatcccagcatactcagatgcggttggattcaaaccaactgctcgaatctcataacctaacgttgttttcttcatcatgaaccaaatcaacacgaggaagatcagtgccatgaaaataccaatgtttaaccgggaattgttggtcaaatttgctaagaaaggtgtttgtaaagaggcattgtcgcctaccattttggtcacaccttttgttgtgatcatggattcattcatgacgttattgacgatatgatttcctgtatacaataaaatataattcatcataatagttacgataacttcactcgtaccaaagaaggcacgtaagatacctggaatagctgcagcaattgcaccacaggctgcccctacaagaatagcggtaggcaacacgatgattcgaggagcatctggcatagacaatgcgacccagatacttgctacccatcctgctaatgcttgtccagaaagaccgatattaaagaatcctgcagaattcgctactgcgaatcccaaagctgtaaaaatcagtggaccagctgtaacgaaaatctcaccaatatttctagcattcaatccgccgttttgaccattgataaatacggtacggaacatttgaagatacccatcgattgggctgtagccaaatgccgccatgatgattccaccaaggataaaaccaagcagaacagcaatgatcggcacaagcaggttccgaattttttctttgcggttattcaacagaaccacctacttcctccatttgtagctcgcgtcgggcttcttctaatgaataacccgccattagtaatccgagttctttttctgatgtctctttcggatcaacgacgccaacaatctcaccagcatggataacggcgattcggtctgatacgttcaaaatctcatctaattcgaagctgactaacaagacagctttgaatttgtcccgctgttcgatcaaacgtttatggataaactcaattgcgcctacgtctaagccccgtgttgggttcgctacgatcaaaagatccggatcacggctgatttcccgtgcaataatcgccttttgctgattcccgccagagagggcacgagcaggaacaatctcattgactgtacggacatcaaactcttggatcaatccacgggcaaattcattcatttccccgtagtccagcacgccataattgctcagcggtttttgataatacgtttgtaaagcaatgttttctgaaagcatcatgtctagaaccaatccatatttatgacggtcttccggcacatgcccgacacctgcctccgttactttacgaggtttgaaatttgtaatgtcgtcaccattcaataagactttgccgctttcggattttcttaatcctgtgattgcctgtagcaattccgactgtccgttgccatcgattccggcaatccccagaacttccccagcccgcacttccaaacttaagcctttaacagcctctaggccgcgattttcttttacaactaagttttcgatagacaggacgacttcttttggttctgcaggttttttcggtgttttgaaggaaacagaacgaccaaccatcatatctgccaattgctgtgacgttacgtctttgacattgactgtacctattcctttgcctcggcgaatcactgtacaacggtccgctactgctttgatttcatccaacttatgagtaatcaaaatgatggattttccttcccgaacaagtcctctcataatgacaatcaattcttcgatttcttgtggtgtcagtactgcagttggttcatcaaaaatcagtacatctgcaccccggtataatgtttttagaatctccacacgctgttccatcccgactgagatgtctcgcacataagcatctgggtcaaccgataagccatattgctcagaaacccgtttgatttctttgcgggcttttttacggtccaacacacccaatttatttggttcgcttcctaaaatgatattttccgtgacagtaaacgcgtcaaccagcataaaatgctgatggaccataccaatgccaagtttattagctgctgtagggctagtaatattcactttctccccattcatcaagatatcgcctgatgtcggttctaacaaacctgacagcatattcatcaaggtcgacttgccagctccgttttccccaagcaatgcgtggatttctcccggccttacttgtaagttgacatcgtcattggctttgaaggttccaaactctttggtgatatggcgcatttctacaacatatttttcttcagccaagtttctcacatccttactttctaattcgctctcacactcagtgacacaacaatttttaatacaaataaatgctattgcttaggatggttattatcctcatgaaaactcaacagctttcatcaagacattaaccactaaagatgtattagcaagacgagcatctgaacgatagtgaatcgctcaactctactatcgttcagaatttcttgtctttttttttcattgtttaaaaaaacttgcttatttttctggtttttctggcacttcaactttgccatcgatcacatcttgttttgctgtttcgatcgctgcttttgcatcatctgataagaaaccttcagtgatatctacaccgccgtctttcaaaccataaacgatgtgttcgccgccagggaagttatcttctaatgcacgtgttgaaatatcttgtacggctgcgcctacacctttaagtgttgaagccaatgtgaagttgtcttctttgccgtcttttgttttgtatgcaccttcgtcttgttggtcgctatctacaccgataacccaaacttttttgtctgcaaggtcagcttcgttcaattgttcattgattgcttttgcttcttggaagacaccagcaccagtaccacctgaagcatggaagattacgtcaacgccgccttggtacattgaagctgctagggctttcccttttgcagggtcaccaaatgatgctgcatattgagaatcaattttaatctctttgcctaatgctttagaagcatcttcgacacctttgataaaaccagcttcaaaacggtcgattacgacaccttcttcaccgccgataaagccaactttgtttgtttttgttgtataagctgctgcaaaaccagctaagtaagctgcttcgttgtctttgaaggttgcagaaacaacattgtctttgccttcgatgacatcatcgataatcccaaattgagtatcagggttttgtgctgcagctgcttcaattgaatctttcaataggtaaccgacaccaaaaatcgttttgaatccgttttggacagcaccatttacgtttgttgtatattctgaagcttcatttgattgaacgtagtcatatccaccaacaccgcgagcgatgttatgttctttcccccaagcttccaaaccttcccaagcagattggttgaatgaacggtcatctacaccaccgatatcggtaacgattgctacactgtgtgctgcatctgttttgccgtctgcagaaccgccgcctgttgaatcagtcgaacctgactttcctccattgccacatgcaccaagtagtgtcaacccagccactgcaacaattcctaaactaaataattttgcttttttcattgctgtaaagccccctataaaatagtttttatttttcaacagccgcttcgactgaatgaacatggtttatagatctttgttcgtaaaataatatggcagcaacccttcgacagttgtctctttgattataccatcgtctcccacaagagtgactggcatatccggctgacagaactcaaccattacttggcggcaggcgccacaaggtgagataggctctggcgtatgaccagcaacaactaagtgttgaaagtctttttcgccttctgaaattgctttgaaaaatgcggtgcgttccgcgcaattcgttaagccaaacgaagcattttcgatattgatgccttgatagatggttccttttttggtgaccaagcaggccccaactggaaatttagaataaggaacgtaagctttgtctaatgcggcaactgccgtttcgatccactcttttttcgcttttgtcatgatgaacctcactttattgaattagtagccagcccccgttgaccctgtaacgattgctacacttgcactggttcctaaacgatttgctcctgcttcgaccattgctgctgcttctgcttcgttatggatgccgccagatgctttcacacccatttcagggcccactgtttcacgcatcagtttgacatcagcaacaaccgctccgccagtagagaatcctgtcgatgttttgacaaaatcagctcctgctgctttcgctaattcacaggcctttacgatttcttcattgtctaaaagtgctgtttcaataatgactttcactaatgctttgtctttagctgctgcaacaaccgcttcgatatccgcttgaacttttttgaactgttttgatttcaaggcaccaatattaatgaccatatccacttcatcggcaccattcttgatggcatctgccgtttcataagctttgacttctgatgtattggcacctaaaggaaagccgatcacggtacaaacagccgtcggttcaccttttaattcttctgctgccaaagctacccaagtaggattgatacagacagaataaaagtgataggtttttgcctcttcaatgatgcgcaagacatcttcttttgttgcatctgcctttaaaatagtgtggtcgatcatgcgatttaattccattccactcgctccttattctgtaatgatttcatggatcaacggtggctcaccgccgctttctccgatttcaatattttgatagatcaattcgatgacatcatcgatggcttctgtgttgctgtagatcgttaacagtgcttcaccttgctcaacagactctcccacttttttatgcagtttgattcctactgcgtgatcgatgtcttcttctttggttttgcggccggcacctaacatcatagctgcgatgcctagttcattggcaacgatcttagttacgacgccagaagtttttgctggtaatgctctttgataattggcagtcaagatttggcttggatcatcgatcactgaatcatcgccaccttgattacggatcatttcacgaaatttagccaacgctttaccagagtgcagtgcctcttccaataatgcgcgtgcttcttccaacgattctgctttttgggctaaaacaaccatttggctgcctaatgcatagcacatttcttctaaatcagctggaccgtttccttgcaatgtttcaatagcttccactacttccaaactatttccaatggcttcgcctaatggctgtgacatatctgagatcacagccattgtctgacggttcgctaatttgccaatccgaaccatcgtttgtgctaagcgtttggcatcctcaattttcttcatgaaagcaccgtcaccagtcgtcacatctaacacgatggcatccgcacctgctgcgattttcttactcatgatcgagctagcgatcaatggaatcgagcttacggtcgctgtgacatcccgcaacgcatataattttttgtctgcagggtccaaatcccccgactgaccgataaccgccactttgctttcgtttacgaggcgaataaactcttcttctgcaatctcaatctgaaacccgggaattgattctaatttatccagcgtaccgcctgtgtaaccaagtccacgaccagacatcttggcaactggcacaccaacacttgctactagtggtgctagaatcaacgtggtagtatcaccgacaccccctgttgaatgtttatctactttgatgccttcgattgaagaaagatcaatgacttcaccagaatttgccatagctaaagttaggtttgtgatttcttcatcggacatatccacataaaaaatagccatcaacaaagcactcatctgataatctggaatacttccttcagtatacgcagttacaatgtagtcgatctcttcctttgtcaatgacttaccgtcacgctttttttcaattaaatccaccattcgcatcaaaatgaccctcgcttcctctgacattatacaatatttttcttgtaggtaaaccactttagtaaaacggtttactatataaaacaaaactatgaaaacacttacaattggaaatataccgcactatttcgcaattgtcaatgccttcacgctctcacgaagaattaattttgtatcaaaaatcttatttggaattcttcgagaaggaaactcgatggcgtctaccaaaaatttcgctgccgtaaagccaatctcaaaggttggctgcatcaccgtggtcaatggtggtgtgatgtattccgttagcttcaatgcgtcaaaaccaatcacagaaatatcctcgggcacttttttccctgcttcatagattgcttgataacagccgatcgccatagcatcattcccacaaaaaatagccgtaagctcgcggtatttcaataatttcttgcaggcatcgtatccgccggtcactgttaactcagccgactccacgtaacgccctttaaacgggatctgatgatctttcaacgcatgacgataaccattgaaacgttcttccaattgataataaccagtactttcttttagcataccgatgttttgatggccattattgatcagatagctgactgcttgataagcgccttcgtattctttcacaatcaaacggccattgtctctttgattgattccccgatcgacgagaataattggtcggtcatcaaaaaaaccgctcttcaatgaatactcgtcaggcagctgatgcggtgttgccaaaagaataccatccactgatcgatgagacagctctctcaaatattgtatttctttttcttggctatgtcgggagttacacaataccagcatataccccaatggattgaaatagctttctgctccttcaatgattttagaaaagaaaaaatccgtaacgtcaggaacaatcataccgatcgtttttgagtggcgattgattagattcgaagcaaaaaaatctggcttataatggtgcttattaacgatatccagtacccgtttgcgggtttcttcactgaaacggctacctttattgttcagaatttgcgaaacagtagttacagatacccctgccatttcagcaatctgcttgattgtcagtttcatttacttctcacctctttcttgcctaaagtgtagcaaattttttctaaaaaaaatagcaccccttgctttcttccaaaattttctttttacaagggttaaaaaacagctccattccttaaaaaaatcgacaaaagaaaacaaaaaataaaagaccagcgattctaggcagctccttgtagtgaccccaaaaagttagacttttatggagtggagaaatccactccttttttgtatgataagattaactgttagacagctgtttttacagcttctcgaaactgaaccggacttcgccaatttaatttctttttgatgcgtttatggttgtaataatagatatattggtcaatttttgttttcaattcatctaaactccgatagacttctccgtgaaaaatctcttgctttaataaaccaaagaagttttccataggtgagttatctaaacaattccctttacgagacatactctggaagattttatgctgcttcaatttattcttataagcattcatttgataggcccatccttgatctgaatggaaggttctacgaaatggacaatcatttgtcatctggattgcttcttctaatccttccattatggctagtgcgtttggtttttcagaaatccgataagatagaatttcactattgtagaaatccatgaaaggatctaaatacagctttttctgacgaacgacacctgtggtgtctacttcataatacttaaactctgtggtatcagttgtaattttttggtgacagatatttgtataaaaccgacgatgaatacgatttttggcgacagtgccaaccttcccacgataagaattgtaccgtcgagattttcgagtgtaagactttacttcgatacctagtttttttatcagacgttgaatcttctttttattgacatgaatcccttgattctctaattctttttttagtcgcagacagccgtaatctttatgatctttgcgaatttcaagcattttttcttcaatttcttggtctgggtttggtctgtcaaaccgtttctgccaatacatataggttgctttaggaaatttcaatgtttcaagaagctcaactagtttgaatgatcctcggaggctggcgatgattcgtgcgattgattcttgcgtctttgctgggcttcctgttttcgcagcttcctcaactcttttaaaaaggcattctcaatttgaagggatcggacttgcttttctaatgccttgatacgatcgcgttcttcagttgttgtattttcttttttgttttctttttttctagtcaaagtaagtggtcgccctttctcttttgagagcccctcaatacctgcttctctgaaattacgcatccaattggcaataagcgcagggttgttcatttctaaagtgctagcaacttctcgataggacatctcacttgtttgatataactctagcgtatttaacttaaattgaacagaatatttctgattttgatgctttctcaatagaccttcctctccgtattcacgatagacattcacccaattacttacttgagacttgcttgaaataccgtatttgttggcaagataccgatatccgcccacgccactaagatattctttaacgatttttagttttaattcaaaaggatattttgccatacaaataacgacccccaaaagttagattttttggtctaacttttgggggtcgcttcacctagcaaatgatcgtggtctttaaaaaacaggtaaacctattgtgaacgtgaaaaacgtctgctttgcgcgcttattctttgtagctttgaataatataataccctttgtcttttttgatgatttcggcattaccaaaggtttgttgcattttcttttgggcactgggggcaccttgtttcttttgaatcacgatcgttaatgtgccgcccgttttcaatagcggcagagcccctgtcaagatctcatgaacaacctctttgcctgcccgaataggtggattgctaagaattgctgcgtattcgccttgatgcaaggtttcgtaaatgtttgaggcatgaatgtcggcattctcgatgccatttcgtttcgcattgccttgggcaagatcaaccgcccgctggttgatatcgatcatttccactggacgctgggatgcataagccaatgacaacccgatcggtccatagccacaccccacatccaaaatcgttccctctggtaaatccgcccattcaaaggcatcaatcagtacgcgagagccataatcgacggtctcccgggaaaataccccactatctgtcacaaactgaaatttctttccttttaactcaaaagaccattgttcaaaatcatgtgcggtatccggattctctgtataataatgatttcccatctttgctcacccttttttcttttaactagcgatagttctcgctttatctgtttgacaatcaaaagcatttcatttgctgactcttttccatgatacccaaattcctgcagaagtaaactcccgataatcgtttcctcaatgaatcttagataattttcgtttctttgccaacgatttttcctattttttataagttcctgccatttctatggtaaaatatttccgagcagcaaccagatacagaaaatcagccttttctgaaggccaagtaccggtctgcaaagatagacaggttctatatgaaggagtcgaacatgcaagaaaccatgaatttttatcaaattcctcgggagcaatggcaaggcttttacaccaatggcatgatgcctttcactcaagaagaattagacaatatcaaaagtttgaatgaccgcatctcggtccaagatgtcgaagatgtttacgtgccactgtgccatctgatccacctttatatgaaagaatttgaatctctcacgttaagtaaaggacttttcttgcatcgttatgtcaaaatgccgccattcattattggcattgccggcagtgtcgctgttggtaaaagcacaacggcgcgtttggttcaaaacctgttgagccggcttttccctcggcgcaccgtgcaactgattactactgatggctttttgtacccaaacgaggtcctagaagcacgagggatcttggatcgaaaaggattccctgaaagttatgacatggaagcattgatcaattttttgaacgcggtgaagtctggagaatctgaaatcaagatccccgtttactctcatgaagtttataatattattccggatacgtttgaaatcatcaatcagccagatattttgatcgttgaaggaatcaatacattacagctgcccgcaaaccagcagatttatgtcagtgatttcttcgacttttcgattttcgtggatgcgcagcccgatctgatcgaaaagtggtatttagagcgttttgaatctcttttggatacggcttttcaaaaaccaaacaattattactatcagtatgcgattggcgaccgcggtgaagcaatcaaaatggcaaaagaagtatggaaaaatgtgaatttaaagaatttacacgagtatatcttgcctacacgcagcagagccgatataattctccataaaacaaagcaccattcaatcgatgaagtattcttgcgaaaatattgactgcttcattattcacccttatgctgttgaaaaggaatcttccttttttcaataaaactaaaagaatagaggtaatttattgtgacaaacgttgacaacatgccaaacgttgaaaaaattatcgtactcgattacggtagtcagtacaatcaactgatcacccgacgtattcgtgagttcggtgttttctcagagttattgagccaccgcattactgctgaagaagtaaaggcaatgaatcctaaagggatcatcctttctggcggtccaaacagtgtgtatgatgagaaggcatttggtattgatgaaaagatttttgatttggggatccccgtgttaggaatctgttacggtatgcagttgattacttataaattaggcggaaaagttgaaccagccaaaaaccgcgaatacggtaaagcagaattggaagtcacttctgccgatgctgctcttttccaaaatacacctgtgaaacaaacagtttggatgagtcatggcgatttagttacccaagcgccagcaggttttgacgtcattgccaccagcaaagactgtccaattgcttctatccaacatgcagagcgcaaaatgtatggtatccaattccatgccgaagtccgtcattccgaatatggcaatgatttgttgcgtcactttgcaatcgatgtttgccaatgtacaggcgactggacaatggacaacttcattgatatggagatcgctaagatccgcgaacaagtgggtgataagaaagtcttattaggtctatccggcggtgttgattcttctgtcgttggtgttctcttacaaaaagcgattggtgaccaattaacgtgtatctttgttgatcatggtctattgcgtaaaggagaagccgaacaagtcatggaaagtcttggcggaaaattcggcttgaatattatcaaagttgatgccaaagagcgtttcctatccaaattggctggtgtttctgatccagaagaaaaacgcaagatcattgggaatgaattcgtttatgtctttgatgacgaagcaaccaagctggccggtgaagaaggcgtgtctttccttgcacaagggaccctttataccgatgtgatcgaatcaggaacagaaacagcacaaacgatcaaatctcaccacaacgtaggcggtctgcctgaagatatgcaattcaaattgatcgaaccattgaacacattgttcaaagacgaagttcgtgaattaggaacccaattaggcatgcccgacagcatcgtatggcgtcaaccattcccaggaccaggtctaggtatccgtgttcttggcgaattgactgaagaaaaattagagatcgtccgtgattcagatgccatcttgcgagaagaaatcgccaatgctggattggatcgcgacatttggcaatacttcactgtcctaccaggtatccgctctgtaggtgtaatgggtgatggccgtacgtacgattacactgttggtatccgtgcagtcacttccatcgatggcatgaccgctgactttgcccgcatcccatgggaagtcttacaaaaaatcagcgtccgtatcgtgaacgaagtcgcacacgtcaatcgaatcgtgtatgatattacgagtaagccacctgcaactgtggagtgggaataagagaaaagagcttagaatcctttatttatagggagtctaggctctattttttgaagttatgcaaccattttgcaaccattagcttttattcttcttctgagttagaatcattaaaatcatttttcatttttctacataatttaagccccttaacttttctttgtgtaagttctaaagaatcataactttctctacatccgaaattattttgctcatatttaccaacttcatttaaggctaactgaaaagctttacataatgtttcatataaatcatttccatcagcataaacagacataacttgcatattcaattctttaaactcatctggtatattttcgccaaatctttcaatttttatagacacttgattttcccgcatacaaaaacctcctaattatattctaaagatattttctattcaaaaagatttctttatcatcaatagacattgaccatttttaaaatctaatataacgccatataacttagtagtactaagattttttttcaaatatttcgttcaacttgttaatcacttcatcactttgccaatccagtttaattggtataagtgcgccattatcataaagtaaaatttctccactaccagtttctttgaaaaatggtctttctttgattgggataactgtaaatgtatcaattcccacaagttcaaattgtcttttacggacggttgtgattttcgtttgcggtgtatgccctacaatttgtttttgatactttggatttggcaaaaagcttaattcatggtcaaaatcagcccataatggactacctaaaaagtatttcccacctcttgctttgccgacatgatcttctaaatcatctaaattgtcgattaaattttcagttattttttcaaaatgccaatcttctaaatcaaagtcttgggtgtaaccagcatgactaatcaaataatcatctaactgaaaagcaatttgcagatttaacttcaacagctttcgaccaactgaaagaaatccatctgcactttgcagtgaataccttctaggtgtcaccgtcaaataagacacgtcatgatttcctaaaagatttatcacttcgacaccgaaaactttcatctttgatttccatatgaacaaataatctaattcattcatgtaaagatcaacgtttttttcttgctcgtatgcgtctgtataatctcctagcaaaatcacttgtttaatgcctaattctttaactttctgctcaaccattggcaagattatttgtgctgttaagtgtaaatcgcccactaaaagtgttctcattttgaatcactctccctctaactctaatattttaaacgccttttgatatttcttaactctttcaaagtctttttcagttggggtagtaattcttgaaagattcatattatcttttaagtctgcaagttttaccatggtggctagtttatttttcttaatttctacaatatagtcaaaatagggttgataacgttcctgtgtcaaaacctgtactgccgaaacaatcgtgtctgaaaaacctaactctttcagtttttcaatagtaatatccgtgtcttcaacagtatcatgaagataggcaacaaccttagcatttttatctgttagtgaatttgccactcgttgaacatgaaaaaagtaaggttcaccacctttgtcagtttgaccagcgtgagcttttttcgctacctcgatagccatatttttaaatttatcatattctgtcatgttggcaatcctgactttcttttaaaattttggtctgaatgtcattgaggaaatttatttcttgctgagaataatctttctcaaatccgacaattgaaaaatgggtaacattcttgagtaaagctgaaacgacacaatcaaaagaatgtgcatggtctcgccgtacatctccggctattaaggtattaaaactataatgtaacccgtcctcaataaattccgataaaacataatacatatcgccaaattcaacacgattacctgtatcaacagcccaaacaccagatttagaatcatatttcggtattttttgccctttaaatttgtctgaatcaaaaacagtattttccatattgatacacctcgtcattctttatgcttcacatactgattgcctgtaagtttccgttgcgcattttccttaggcatttcaatagtattcgttaattttttagcgacttctttgttagcgttctggtataaatgtccgtaagttcccaaagttgtttgaatatcttcatgacctaagcgatcacgaacgaccaacgcattttcacccattgaaatcagcaatgaggcatgagaatgtctaagggcatgagccttgattctatgaatgccagctaatttcgaatgctgggtgataacgtggtaagtagcactcttatttgttggcagtccattgtaagacaacacgtattttgacggcacattttttgtttgaacggctttccagtctttcaatagtcttattgtatcatcatctaaggcgataactcgattactagcctttgtttttggttcagttacataaaattcgttcgcatttttataatacatagatttgtttacatgtaacgtttgattttcaaagtcaatatcattatcccattctagcgcttgtgcctctccaaaacgcaaaccagtcataaagagcaaccaaatcagcataaaagcaaaatgttcatgatagtccgataggtcaaatgttgcaattaccttttcaaattcttcttttgtccaaaaatccactcttttcttcacctttttcacgttgccaacttgtttagcaacattcttatttactaaccccaaagtaacagctaaatctaacgacatttgaaacagtccataaatattacggatataagcagatgaatagctttcagatagtttgttttgccatttcttgatgattggtggtgtaatgtcttttaacttgcgattagagaagtaggcgaaatgaatgtccatggaggacacccgattttcataggttcttggtttaacagaacgtttgtaatcaggtttaaaatacgtttcataaaattccttgtaagacatggtgctattctttttgattgcggaatcagaaaaatcgttcatgtaatcatcatagccacgttttgcctcacgttgtgtattatagccacgcccccagtgacgaatacgtttgcctttctcatcataaccgaggttagcgacaaagtaccatttgccacttttcttgtcttgataaatattagaaattttcggcataatcgcgtacctcattgacaataatttcaaaacctaaaatctcttcaacggctgaaataggcacacgtcccaaacgtttactggcataataagagtatcccttattcaccattaaacattttgcttttcgaataatatcagaggattggctcggtccaaatcctaatgcagacaattctttttttgttacagtgttattagtcaaacgaatcactcctttaaaatttttgtgtaacgcactgttccagttttaaaaacagaatgttgtccgtcaaactctttaaaatcaagaatttttcgtttatactcctttgagtaaacaattttttcattagaaaaattaaacagttgtgatgtggtagtttttctaatacgaggcgtttttaagttttgcgatttaaaaaacgcctttttcttatgttcttttaattcaaggtctttagcaaaatatttgctaagataacgcccacgattttccttgctatcaacatcaaccttgttaatcttgacatgaccgtttcgccaaatttttgtaagttctgaatttttaatataaccaagtgagaagaaaactacatggtagtgaattgcgcctcgtttctgtttttcccatgtagcaagatactttgctttctgatttctttttttcaatcgtctatttagtcgttgaataaattttttaaattcattatttgagaactcaatatcttgaacattgtcacgaaatgttaatgtgacaaattttgttgcttcatcaaaattacaatccacgattctagcaatttcccaacgcatgtcttcataatgttgttgttttcgctttaagctatcatatttctcattagttggtagctcatcataagttcgacgtgtattatcatcaattaaccaatctaattgacgtgaaccattttcattttcaacagactgactatagaaaataggttcatcatactgatacacctcaatgtaggtggaagtttcaataattttagtattatacgcacgagtttctttagacatcacacacctctcagcgcgcgctcaaacgagcagatgttgttttatatatcaagttaagtgtcgggcaaagaccgcccgactggccccctcaaagtgagtgaaaagactcggacactccgtttagtcgctggggcgactacctccctatttcactcacttcgagggggataatttgttgtaggctgataatcttttctaattcggctatgaaatcaaagtctttcatgaatggtgtttcaaagtatttttcttcgccttgtccgtcaatcttgatatatccgccacctttaacagaaattgtcttatgttctacgctagatgagccgaaacacattatatttgcctctttactggctgaacctaatagcgtacggcaaccaagctggtcacgtaaagcaccgtctaaaatggaactgtctggacgttgaagaataatttccacgaaacaacccattgcacgcccttttaaaatcaacgaatataagtaagccatgcattccgcacttaacttcttatccgcactcttgataaatgctgcaaattcatcaaacacgagtacaacaggcggtaaatcgaaatctacaaaggttttaccaaacgcagaaacttcactgaaatattgtctatatctcgtttccatgatttccgttacttttcttaatactcttgctatatggttcggctcactgacaactctatcttcaaagccatgaatgtatttcaataacgataaatccgccgacttcggatcggctacataaataattgcgcccatttgtgcataagctaaaattttgtattcaatccaaaccgattttccgctccctgtattgccaattgtcaaaccatgacttaccttgctgacatcataagagattttttcagtaacttgtatctttgtgccatttgctttaggaacgccatgagagaggtataagcgattatcgggtattttctcaaagatatagtcgcagtattgaatatcgtccataacggagcaactagcgccaaataaagcggatagttttgtctcacaagtattggcaaggtcattccattggtcaccatttttcaaaaagcgaatcacaagtttttcgggtgtatttagatagagtaggtacacgctatcaatgacgacgtttttcttcctatcatttccattgttatcttgaccgattatgcggtagccactttcaaataggttgttatccatgatgaaccgccttaacaacttatagggggaagtcacccacccccgttttcgattgattacgaatttataagttgtgtaaatcagcaagcaaaacaaaccgataagcacgagaatgaacaagaatccattttgaatatgactttctagccaaatcacacttcccatttcagcaaaaagtacgaatagtaatgaattccaccgatatttcagcggtacactaggtgagaatgccgaaactttttgaaatttgttttgtttgtttttcataggttacgccttaactaatacgcatttgtcagctttagaagataattgaatccaaccatttgaaacatacggattgaaagacagattttcaaacttcacataagtttcatctggaatttcatcattatcagtgtcaaataacggacgaggctcttcaattttgacagtgattttttcaaatttcttttcaagacaaacaacagtgtaattgtagtgtgtgattttatccgtcttttcaaattcaccactagaattttttacacgttcataagcgggtttcaaatccacaagaagaagtgacttgccagcggttgcgattggatcgataattggtttaattgccatttcaggtatttcctttcatgtttaacgttataagtgacggtgagtagataatgcaatagggcgaacccctattaagaatggtcatcatgttagtagcctcgtaatttatcccagattgattgtaaccagccgtaaagactttgaagtttcatttttgttagaaagaacatagagataaataatgatagggaacagactactgctagtaaaccgaacattaagccagttacttttgttgtggctagtcctagcccaagtccaagggctaagaagaagtagaaacgaaaattatcatagttcatttttttcaatcctttcaatttttgataatgctttgagtatgcctttttcagcgtattcacgttgtagtgtgtctaattgcaagtaatatttgatttcttgtagaataatgtttgctttttctgaattggtcatgatagcctcttcaaattattttataaagtgttaccacatatacacaatgtttagttaaaaaattctaaatagcggttaaactatttagaaaaaaattttagtcctctaatcgactataaaaggcgaagacaactagcttgatgatataactcaatcttgggagacgtttgccaggttcatcacttttaaagtgataacgatattcttctaatccctctaagacattctcatctaaaaatattctaggggtaacggtatcctcattttgaaaattttctttaacggccgttctgtccatgcgattttgaattttttcccattcatcatcagtgaaatttcgttttttacagaatctatatgcctgttctatcacactaccagccgatacttttaacactacgttaaatgagataccgtcaagtaaatcaccgtaatgttcttgcatatctgtttctagtttgtccgttagaccgttttttatttcttcttttaattcacgttctctacgcaaaattaattgatctatccaaattttcgcctcataagctagacgaatagttttatatactcttgccatgattaatcagtcccctataaaatgatttcagtcgtaaatattgcatggtctggatagggaggttcattaataatgaaatatccttctggaaccatatatccttcaaggtatgatgaattattatttttcccaaaactccaatcaagttgattatatttagaattataatcaattgatacccctttgctaatcatccagtctaatcgtttccatttccaacttgttccaaaaggtgaatacggagaatattggttacagtttaggtatttttcatctctcatcatataaataatatcttgccaatttagttcttcctttttgcaccaatcgacctccgagggactatagtttaaatcgccaataataatttgattattgaaatgtttgttttcttttagtaaccaattgatttgagattttctactgatcaattcatcttttcttttttttgagccaactcttattctcgtaccaataatcgttaattcttgcccagtttttattgagctttttattttaagccaattgggttgattattttcaaaatcttcttcccaagatacatcttccagagaagactcattaaatatacttttctttaaagcgatataaatcccgttgcctcttttaacatcattcttattattggtatactttgaaccgttataagaatatgtaaaataatcttcagaaaaagagttatctaatctaaacttattttcttttcctttaaattcaactaacactataacgtctggatttttttgagaaatttccgagataacataattgggaaatttgctatcttcactagaacgttgattaatattccattcaagtatttttatatttgtcattattattaccttacttccttaatttatcgaccatttaaagcataaacaaaagctaaataatttgcaaaatcaccaattcttttgcgtactgattgcaagtcatctttatttctagtaggattatcactttgaagaaataatttttccgtccatgttttactatcccaatcattcattttaaaaatacgttctaaaacaatgaagttgttaatcacaaggtcatgtgctgaagttcgagaattgtctttctccattttttcgtttttagtcattaaattccactttgcacgaatagaggaataagcaatcacagaacgaatagtttcttcccaaaattctttgaaatcttcattttttgtgtcggcattagataaaacttgttcgtgaatgtcttccatttcttcaaagctcaatggttcgagtggcgaagctagataattgctaaaagtgatttgttcaaattccatgagttgcctcctctgcttatctaaaaagtgtttttagtgttaacacaaatataatatcatgtttgaaataattttcaagtgatttgttcaatttttttttatttgcaacctctttgcaaccaatacagaaaaaacgttacgatttctaccattttcaaacaacacaaaaccgtataaactcaacaaattaatccttacaaaacgttaaccgcatggagtgggaataataaaagaaaccgtgaatcctttgatactaagggattcacggttcttttttgcttttgaagttcttttactgaagaaaagatactatagagaaacagttatcatatcatcgtctgagattagtcgtattactttacatgttcaacttctgctttttaaataaaaattaattttgtatactattcttaataaaatgaaagaaaatcaaaagagctaatatgttttttagcaattttcagaagaaaggagggttcttttgagcaaaacgataaatctgactccgcccataaggcaaagcttcaccatcttcatcaaagtagtaaataaaatcttgcgcaaataaagtagcccgctcaataaatcgctctgaccattctggatcttcttctttcataaaagtagcatagatcaaaccgtaataatgaaaggcaaaagcaacataataatcgcgttgcgttacttttccatctacgtaccatccatcaccaatatacatcgaatcgatcaacgctaattcttgtgtaagttcgttttttgccaatggatccccacactgatacaatgccacccggatcaacactttaaagaatgtccaattgtttttgggaatcttacaggttaatgcgtgtgacaaccactttttcagtgcttgttgattcctttcaggcaattgctcccaaacatattctttatgtagtaaaagtgttaatgccaatgccgctgcttcaacaatatattggtcatagtccgtgatctctccccaataattttcgctgccagggtcggttcctgtcattaatttagcaacataggcatctcgcaacggatcatcttggcatgctgtccaataaggtgcgatcccccatagcggacgtacaagcgcttccatctctgcacgcttctgatcatatacagcaccgctgctacctaaattcaatcctggacgatcagtggacaaaatagctgcccgcaacggttgcatgatttgttcaagtgccgcttggtaatcctgacgagtcaaaaaaggattctcttgtaacgacgtcattgtcagccctcctctatcgatttacaaaatagaatagcaagcaaaccgggctttttcaaccgttctcattctatgaagcagtgataaaaatgagagatttttctctcgtatttctcacttaacctattaacaaaagaatgacccgtgattctatctcaaaagaggagtcgcagtccgaaaaagttaacctgtcaaatatgaaaagtctatgatagattcccagatttctcgaattttttttcataatttttttctaaaaaaagaccgacacatgttttggcgcttgaataaaaagttggctttcaaaaagctgcagacaacttactctcgggcgtgagactaagtaataccccatcaagctgtatctgctaaatagctcataaagtttctcctgtcggctctttctctcaataaggaatgatccgaggagcagacaagacaacacccttagttcttgactgcaggaagaaccattcgccaattcataaaaaagaagagtgaaaagaaactagaaatgacccatatacagggaacgaattcaaacttaatcacagcgctgctcactttgaactgatacaaggatccagctaaaataagggttagtccgatactggcaaacagagtttttaacaacaaagcaggtcttaacggtttgctgcgaatgtggataatgaccttagcaaatacatgggttaggaatagaatggttaggaagctcaatattccggaagagagcatgcttagcttcaatgctttaccagtctcttccaccagaacaatgcaaataggatggataaaataataatattgtgacagttctcgtaatttttttaagcaggagttctgcgttggattttttgagagcagccaaagaaataagaaaaaactcaacggcacaagcatcaagataaaattcatgtccaatctgtgaatgtgagaaaggaacagaccttccaacacgaacaaacttccaaataacaaaagaaaactagaactatgttttcccattcgggatagcttttcctgatgatcatagatgaaaaagccaataagcgtgaaaatcatgccaaagaacagaccatttctagtcgtaaatgttagcctaataaccagatcaaaaaaatctttaaaccaaccagatggtagaagaccatagtaggtctccaaacttccaaataaataaagaactagtgaaatgacaaacactttttgatacgaaaaacgtttcaacaaatttactataaaaatgaccgaaaggataaatgcagggatgtaccataaatgataataggtgccgatatggacaaatccaacaaacaaagccgcaggaagtagttctattggcacttcttgattttgatgaatccagtctagccccatcggaaggaaaagaatgctccatacgacgtaagagttgattaaatgcaggaaatattcttttaaatattccggtctcatctgcatccccttacggatgaaaaatgaactgctaacaaaaaagaaaggcaccgcaatacgacaaataatatttttgataaaaaaattggtctccgcttgaggaataagggtatcacaatgaatcataataaccatgatagcccctgcatatttcattctatccaatgctggataactcactctttttcccatcctatcctccataaactggtagccacttattttttcagcctaaatatatcacagcagagaaaaaatattgtccaccataagtctgaacttctacactggaagataagcaaagaaaagacgttaaaacacattacatccttcaaaaaaagaatgcagcaggttttaacgcctttcaacagtttacagccattcttgctttacaacaaaaaatgagccgcgaatctcgccagcaagtttcgaacgctgacgagcgaatttaaatttcccttctagctcagcaggaaccggcatcccttccgacagtttgataccaactgcacgtttcggaggctttccttcactggttccatgtttttcatagagtaaattaaggaccatgccactctcataatagaattcaggccaaaaaagatcgtcatcttcgtaaagtgctacttcaagaatgggtgattcaaaaactagatcccgttcttcttttaagatctgcttgatcagtgccaccaaatcaggcttctcagcagctggataggtggtatacacatatttgtatttgttccaaaagtaacgcgcttcatttgcccgcagaccggctaatttttctgcaacaggagagctctctaatccatccgtcactacatttttaaaatccacttcgtaagccatttcttttctccttacgtttatttgatcaatcaccaatactagctaaataatgattatttgatggcttgcttataacactaaagaggaatgacaggtcactagctagcttaaggaaatggtttagccagtactagttggtacaggcaactggatagtcagtcattattgttttggaggacaaagaactagttgtcattgtttgtcgaatagtaggagggatgctatgcttaatctagaaagatttttgatcaatcatctatcgatataagtttagctaaaaaaattcccttcaatctctgaagagaaaaccaataacaaagggctatgatctaagtaaacatccaacgaaatgatctgagttggaggagcggtcgaatacttttcataaagctgtgatcagaatctatgagatcacagaagcctgtctcttagtattcagatcttccgtttattaaaatacttacagtcatcccttttctgaaaaggagaatctctatgaaagtcttatttattggtgcatatggcaaagtcggtcagcatttcgccgagcaactgaagaatcatccacagatcaaggaaaaagccttgatccgaaatcctgaacaagttcctttctttgaagagaaagggatcgagacggtactactggatttggcttccagctcgatcgaaacgatcgcagaagcagcaaacgaagttgacgctattgttttcagtgctggtgccggcggcaaaggactagaaaaaacgatagcagtcgatctagatggtgccgtcaaagccatggaagcggcaaagaaagcgggcgtcaaacgtttcgtcatggtcagcactttcagaaatgatcgggaagaactgttgaaacaaaatagtttgcagccttacacgatcgccaaatattatgcggatgaatggttgagaagccgcaccaacttggactggaccatcgtccatcccggcggtttgacagacgatccgggaacaggcaacgtcaaagcaggcaaacgcaatgagttcggctcgattccgcgggcagatgttgctgccacattgatcgctgttttggaaaatgaaaacagtattggcaaagaatttgaagtcatcagcggagaaacaccaattgctgaggccattcacgaattataaaaccatctgatgaaatagtcccctttcgttaacaagcagtccctgccactatgttgtctctcaagcgacaacatagtggcagggacttttagggcgaaatgcaggctgtgccttctccaaacagcatgcttatcttgtacctttaatcattgctaacgcttgcgaaacaccatcttcgtcatttgaaacggtcacatgatctgctaattctttgattgctggatgaccgtttgccatggcaaaacttatatccgcgttcttaaacatttctaagtcatttaaactatctccaatagcgaattttgttggctggtctaattcataaatgcggctaagatgatcaaaaacaaagcccttggatacggagcgaggaacgatttcaagattgacggccgctgattcagtaacagagacatttggtatattttctatctgcggaaatagctctttttttatctcacgattagggacgaaaacaaacagtttataaacattaatatttttttgattgatgatttcttcaatcgcatcgtaagctgtcgactgaatggtattttcataatcaagttcataattcagttcttctacaggaaattcttgaccaatcgcatagaaaatgtttttcatctcttcttgatagttttgcgattcatagctgccttgattggtatatatttttgttggaaacgctgaaacgatctggctcacttcttttacagcttggggatcaaatggaaaatcaaaaatcagcttgtcttgatcgtacccaatggcaccattcaatccgaccgccgggatcgctaaatcagcttctttgaggatcgcctgaatatctcctacttctcgacccgaacaaataaagggaatcaatcactggaaagcgactttaaagaagcggcatttttatgactgatcttttgctccgagtttagtagtgttccatccaaatcaattcctattaaattcatgatatacgctcctatattgtttttctttattatacgttttaacttaggagttgaccaatacctttcgcacataggttgttatctctacaacagcgaatttattcatatgccttgacttcgctcaaacaaatgtcctaatagttagagcattgctctaactagccagttcaaaaaaagaggagaatgaactaaaacgatggatatcatcaagatattgattatgaaagactcttgtaaccgatgactttaatcagtatcctgctggaaatctatttttgcgctatctgcgatttttatccagatagacctctttaataagcaatatgatttagtgccttaattacttttattcaggccattgtcagcatctgctaattcatataccatcacgactgtcgaacaacgctcaccgacttgattcacccaatgatctttcaaaaaaccgctttgtttgaaccctactttttcgtataatttcagtgccggctcatttgtagaattgacagtgatttcgattcgattaaagcgattttgggcagcaatcctttgcatgcctttttctaaagccgctttcccatagccttgcctttgccttgacagttcaccaatctttatatcaaacgttgctcctttagcttcgataggcttgtaggcaaattctccaatgaggtggcctttttcgtctataatcaataaaaactcaccagaaacctcctcgtagtaatgaagcgattgctgtacttcctcaatgctcactgctaacccttgagggaaaccgaccgctgccatcacctttccgtcttgccaccatttctggatcagtgggctatcatctattgttgcttttcttaatgaaattgccaattcttttctcctttatttttatcagttgtctctctcacgagggcacatccaagaagaacctcgttcgattatttcagatacttttgcagagcattctcacttcttctatgacctcaatagaaagtctatttaataaattggtttgcctattaatcaatagtatggcataaaaataagcagcagtaaacgctacctgaatttctaaactttttctataaaaaaacagcagccactggatcttgtctgcccctttggttgctgtttttttaaattgttgtcttcagttgtgtttttttacagtatatatagtgttaaaccctgtttcacaaccagttaatctgccttttctaaccactttcgtgatttttcaacctcttgataggtcagttgatgacttggggtccaaacatattctatttgtgcacctcgagactcaaaaatcgcttgcacatacttgctgtcttccacagaaacgatagggtccttcagaccaaaactcataaatacgtttgtttgtgccagtaggtgattgggtaatttcgatactggatacattggatggtacaaaatcgctttttgaaaaagagcactgaattccagcaatagattgagcgcaatattggctccattagagtaaccaaccaagacaacttgttcgattgagaaacctttttctttagcgacttcttgaatgaatgctgccagttcttgcccccggaacattaaatcttcttcatcatagatgccttctgctaatcgtttgaaatagcggggcatgccattctctaaaacattgcctcgaatacctagcaatgatgcttggggatctaggtcgtgacctagatcaagcaaagagcgttcatcgccgccggttccatgtaacaagacaagtacgggagcagctggttttccttggtgaaagataaagttcatttgtcctccttctcgtttggtcgtgccaaatcgaagatctcgccgatctcagcatacgaatttcccgcaagtcggctaactgccgccaattttttgggattgatttttccttcttcatagacctgttcatttatttgatacccagtgattttaagtaagagcagatccacttttatctcttctttgtttttttccttggtttcttcctcgttaatcggtacatgttggtaaagggtggtttcaaagcgaattttcgcctcttgcaatccgggtacgccaaccgtttgagaagggactggcgtaaaatttgcgacggtcaattcactttgttctgcaggtaacagtgccgctgcctgattggctgcttccacattgctgcgatccaagatatggatcactgcttccttggtcgtgagtaagttacgagccgtatctttcatcgtgcccttttttcgctgaacagcgatcgaaacgatggcgggttctgaactgacgatcgaaaagaaactgaagggggcaatgtttacggtcccttctgccgatcgtgtcgttacgatggcaaccggccgcggaatgatcgagccgatcaataatttataattttctctttgcgtcagattttggggatccaaataaatcatgcaacaccgctttctcttttttgtgtatgattgatgacttcctacttgtaaattaaacagtcaatttgggtaaatgagctgtgatttctccgcggcgctcttcaaagtgagggggcaatttgagtgctgtccccagggtttccaatggttcatcgatgagaaatcccggagattccgttgcaatctcaaaaaggatcgtaccaggctctttaaaatagacggctttgaagtagttacgatctttgatttctgtaacaccatacccttttgtataaaggtcatcttgccagttgatttggctttcctcattcggtaccgaccaggcaatatgatggacggtaccgacaccccaacgaccaggtctcagtggctctgttggtaggagaatctcgtgtttcactggtccggcagtcaccaatcgtcggtttgattctgtctccgctacaacttgcagccctagatcatgggtcaacgtcttgaatgtttcctctggcttagcggaaagtaagaccgctccatggaacccaagaatcgcgtttgtttccgctgcttccccttccactagcgctaaagacagttcatgaggatcttgaagttccaatgttggttgcccaaatagatggctctcatgaacagtgacttgatgatgggccaattgttgtttccaatagtcgctgctgcctttaggaatgcgaaaggtaatcgtgcccacctgtccgctaccgacacgaccaggatgcgcgttggcccatgggaaaaaggtaatgatcgtgccattttcaatggacagattgctgtagtagagatgatacgtataaggatcatcaaagttgacggtttgtttgactaaacgcaagcctaatacttcgcggtagaagtctacattttcttgcgggtcaccgacgattgcggatatatggtggatttgttgaatgggttgcatcatttttacctccttagttatggctgcgagtggtatcaaacggcttgatcgctttttcgatcattgcacgttggtcttccaaaaacggagccagtgataatttttcgcccaatgtttcgtaaggctcgtcacccatgaagccaggttcatctgtcgctaattcaaaaagaatatgtcctacacgtacatacagcgattcaaaatagtagcggtccacatagccggaattcgcgagacccaaattttcaaaaacttcttgccatacggctaaagattggcgatcggctaaacgaaaggcgacgtgatgcacttccccgtctccttgttgtgcttgtgggcttgtggtatcttcgactaagacgatttctgccccattgcccccctcgccaacttctaatagcgtgcgatttccttcttgatcgatggctttgaatccaaagacattttccagtaatcccttgaaatcggcaaaataagaaacggagatttcgactgggcctaaaccataaatagcgaattcttctggaactggcccttgtttccatggaatacctgctttgacgccttgattgtgttcatcagaaatcaattggtaagattgctgatcaaaatcccagaagcgcaacacttttttgccaaattctgttgtgatcgcttcatgtttcacatcaaatgtctcaaaacgctttttataatagtctaatgcagcatcggatggtacgcgaaagcctgtacgggtaattgaatttgttcctttactgccacgatcggtattgggaaaatcaaagaatgtcatcgtggttcctggggaacctagatcatccgcaaaatatgtgtggtaggtataaatatcatcttgattgacggttttcttcactaaacgcatccccaaaatctctgtaaagaagtgatagtttctttcgacatcactggtcatggctgttacatggtgtacccctagtaattggtcttgttttctcattttttcttcctcatttctcgttataagttatttttcgtaataatgtttttaatgtttgcaactcgtcaatactaagcgaggcaaaacttgccgcaatttttgtggcatgagttggaaagatctgatccatcaattctgcccctttatctgtcagactgacataggtgattcgctgatccgtttgacttgtttctcgacgaacgcagcctttttttacgagttgatcgatgacgtacgtcgtgctgctgctggcaatcaagattttttctttgatggcttgggtggtgtgtgtacctttatgataaagcagttccagaacggaaaactctgtcagattcaagccataacagcggacatcttgtttagccacctgctctaagtgactgctgctgcgtaataaaccaatatagaccttcaatgcttcctcttgatgatccatttcctcacctcgctcgatttatttcgaattcgagataataataacttactttttgtaagttgtaaaacaatctgctttccttctgaaacaagctttgtcaacgtacaacaaaaacccccttaccattagaatccttttaagcaaaaaggatctaatggtaagagggggattgacttctatttgtagcaggtgtttattgtccaatctactaggaactacttcattaagatatagagaaaaatcaaattccgctggttagtatgaaagcagcgaggcagcctctttatcaacgatcaatgtcatatctggatgggtcgtcaatagcgttgccggaacgtcctccattactgttccatctactaattgtttgacgatgcctgcttttttcttgccattggcgatcattaccaatttcttcacctgcatgatgctttttggtcccattgttacatagaaatcaggttgtttttctttgtctccaccaacctcacttaacaaaacgtcagccatctcgggtgtcgcattcgcattcacgcgactcgttaaatctccaaattttgtcgtgttcggtaaattcccacagaaatggccatctgatccaacccccagcaacaccatatccaatccaccatcggctttgattcgttcatcttgtgtttcataattcgtccagtccaagacatggattctttcacgatcgatttccgctggtccaaaaaacaggttgtgcaagttcgtcatcgtgacaccatagcggtcttcttcccctttgaatggaatctcatcaaagttataaaagtgaacgtgctcaaaatattttttattttttactagtggtaccagcatttcatacaccccttttggtgttgatccagcggtgattgaaatattctttcgatgctggctgtgcattacgcctaaaaggtgctgtacggctacttggctcatctcttgataatcttccgtgatgataactttcatgtgtcttccctctttctcattcgtttcgtggacagcggcccttaatggaattaccttctcaaaaaaagccctttcactttctattgtataggaaaaacaggccaaattgttcgacttatctgaaatttatttttgcattctatggcgcacatctttttgatccatccgagaactacaattcttccccttgggcgaatgtacagctgcaggaaatctattcaatactaaaaaagcatctgatacagagtgaagtcggaaatcagcaatgaaatctgcacttttctcctatttacttcctaaccttctaatctgtatttcagatactttttttcagaaaataatccaacagtgaagaatcaaatgcaacgcaaaatctacctaactatagtaaaaaatcattccgcttcttcgatatcccgggcaatttttttcacgtcgatttcccgctgcaagaactcagcattctctatgggaaaatgttgacgaaactcggctacttccattacttctgcttcaccactgattaagctaaaatccagtacatgaccagcaaactgatgatcgtcactaataaagtgcagatggaagcctgctgctgcagcaccatggaaaagtttcggggtaaagaagcctacgatagttcctgctatttctgtcgccgtaaattcaggttgattttgaatgatttcaacgaattttggatagggcttttcttgtttaggcgctacccgcacgtgcatcgtatcaaacattccatgaagcttgatggccgcaaacaaattgggactgatggtcgctaatagtcttcccttgacttcttcatctgtagcttctgtgtcaaaagcaagttcatccgtggcttcaaaatcaacgacagctgcatacggcgtcgtctcggtccctgtcagctgcttcacctgtcctgtttcgtcaacatgataaatcacaccctccaagaaaataatctcaccatttgaaccagctaatgtaccgattcctgtatcaccataggctaacatcttgccgatttgttcggtaccatccatcaaatcttccatcaacccgcctaaagttccgtgttgatataaataacttttgcttttcacgttcatcatgaagctccttctattagtaaaataaatactcttagtaaaattgatccggcaaaatcgtcttgcctaattcggcattatcggaataatcgaccgggatatcaatgacgactggtccatcagttgcaaacccttcttcgatcgcggctgtcaattcttgttttgttgtggcacgtaatccttttgccccaaaggcttccgcgtatttgacaaagtctacaggaccaaattgaacacctgaagcacgatcatatttcatttcttcctgaaatttcaccatattgtaggtgccatcattccagataagatgaatgatgttctgttttaagcgaacagccgtttctaattcttgtgaagagaataagaaaccaccatcaccagatacggaaataatttgcgtattcggccgcactaatgctgccgcaattccccatggcaatgccacacctaatgtctgcatcccattactaaacaatagatggcgaggttcataactgcggaaatgacgcgccatccaaatgtagtgactgccgacatcaacagtcacggtcatctcatccgtcactttttgctgcaatgtatcaatgatctccaatggatgcaatgtttgttctgttccacgggcctctatttgcttttcggttaatttttcttgcaacgtagctaaatagttctgtgcatctgctgataacgtatattgatcgatggcttgtgtcacttgctcaatgattttggcaatgctgcctaacagctctacttcaggctgcatgtatggatcgatttccatcggtacttcatcaatcacaataatccgtgcgtctttctctgcattccaattgcgcgcttcatattcaatcggatcataccccacagcgatcactaaatcacttcgttttagcagcatgtctcctggctgattacggaacaagcccacacggccaaagaaatggtcttccaaagcacgagaaatgattcctgctccttgaaaagtttccacgactggtaatcccgttttcgctatcaaatgacgaatggcttccgtctcgctttcagcagaagcccgcatgcctagtaataaaaccggtagttttgcttccttgatgcgttcaacgagatcctcgatatcctctggattcgcttgtcctaattttggcgctgataatggcttgatggcacttccttcgacttggccatccgttacatcttgtggtatcgacagaaaactggcacctttttttgcggttttagcgattcgaaatgcatttgcgatattttcagataatgtttcgggatcttggatctccgtgctgtatttggttattggactaaagagagcagcgttgttcatactttgatgggtcagtttcgataaatcagaacgtttcacttgcccagccaatgccagaactggatctccttcagctgtcgctgtcactaatcccgttgctaaattactggcacctggaccactggtagcaatgactactcctggctctccagtcaaacggccaatggcttgtgccataaatgcagcattctgttcatgccgggctaagatcaattgtggtccatggtcttctaatgtatcgaagacaccatcgatttttgctcctggaatcccaaaaatataggggacgtgatgattttctaaactttcaacaataatttctgaaccttttttactcactgtactacctcttttcaaaatctgtattaatctcacgactaataatagcacttttcttttatttatcaagaataatacactattttcatctgtattaaaaaaatagcaattaaaaggaaccgttttctagcgctccctaaaaaggattctataaataagaacgattcgtaaaaacaaattgttattatctagttttattttcttatttttttcatgtttttaatataaatcatgttataataaagacatcaaaaagtgaaaggaactagaaaagttatgggtatgtggattagtttggtcagtttcttagcagtaattgtaagcggtattttgttgattatcgctgccatcaagaagcgaccgaaaaaaagattgggatttattttatgcggaagcgttattctattttttgctggtgcaattttatctccgagcaatttgacactatctgttatttcacctgaaatacaaacggatgaaacaggaaaagcgactatcgaaggggaagccacggccgatgctgtcctaacgatcaatggggaaacggtcaaaaacagtaaaggttcttttagctacacagttcacctgaatgatgccactgagcaacaagttgtggtaaaagctgccttaaatgatcagaaaaaagaacaggaagtcttgatcaaaccttccaaagaatttgtggcttatttagaagcagaaaaagcggagaaagaactgattaaacaggtcgaaactgcactagcgttggcagaatctaaaccaacacaaaaaaattatgatgaagcagcaacattggttcattctctcagcaaaacatatgacgattatgatcaacgtttggccgtcctccaagatcatctgcagatcgccagcgcgttagaaaaagcggaacaaagtctaagcagaacagaccttgaggcagctgccaagcttgttgcagcaacaagttcgacgaaaactgaatttgaagatcgactggcttctttacaaacaaaagttgaagagaaagaaacacaagcgaaattgcaagcacaagcgaccaaagctgttgaaaaagccgaagcagagccgactgaagcaaacttagctagtgcaacttctgcgattgccaagcttccctcagcagatgatggattgacgcagcgagctgaagctgttcgccaatcgattcgtgaagaacaagaacggcagcttgctaaagccgaacaagaacggcaagcagccgccgctgcgaaacagcaggcaaaccaagccagccagtcaaatcaaaccacaagcaatcaagcagaagaatatgtcatgatcacccgtacagggaagaagtatcacacccataaatgcggcaatggtacttatttcccagctacgttgtccgaagctttaagcaaaggattgaccccctgcgagaagtgttactgatttttttgaatatggaacagaatctagacagcgttcttcctttctaatcaaagaaaagaacgctgtttttggcgaacaaatatgcgggtcataccattcttcctaaaatatctagcaggaccgagatacgtcgaagcttgtttggtcgtagaaaaaaacgtcaaggctagtatgctcctagcattgacgttcatcgtattttctgtagattatacctgttagatagaaataacacgctggttgcttgtcaaaaggacttagaaagataaagcacaagatcgtcattattgtaacaagcagcacccattgccaagacttgattctcaaaccagacccctgatccgtcaggtaagtagccattttttaaatacagtcgctgtgcagtgccataaccagaatgaagccccacaccaatggtgatcacagacgaaaatgttttggcttgttcttctgcagcttggagcagcttagcgccgattccttgccgctgaaagttttgaaagacatttagatcggtgatctccggatagccattctttttaaaaggaccggcttttgcgtggggaatcaatgtcgcatagcctgcaatctgtcccgagtcttccgcgacaaagacctgtcgcagtccgcggctctgttcttgaagatatctctctaatgtagcttgacgactaggccattgttgtgcaagaaacgcttgatcgattgatcgacaatcactagctgtcattgggcgaataatcaaattgatccctccataaatttcattgtctcattgattataacgcatttcggctcaagcgttcgacttttcccatgtccttgcagaatactgctgccccagttgccactagcagttgctttattcacccatcaacataagatggcaggttcgattcctaactcggttttggtcaaaatccacgaaataaatataccctacagaaccaatttcaagctttccttcatgtaaaataaaactttcactcgccccgaaaaacgaagaacggatatgggcatcgccatttaaaatcgttgctggatctgtcggatagttaggatcatctaggctcatcagaaattccaaatgtttcggtccagggtaacgataatttgtattttccgagagttctctaggcactagtttatccaaaatgcgattcagatcaacttgtaaaaattcatccccattaaaatccgtatcatgcatgaattcctcgaaaatgacggaacaagttgtgtgtggggattggactaaacagatgccgtttttgatttggcttctctctacaaagtccttcacttcttgcgtaatattatgataagatacccgattgccatttgatgtcaatgttagctgttctttcgcgaatttcatcttttaatcccctcatctcttagctcagcaacttttttgatcatttctgtcaaaacgttctgcggatctggcgcgcagacgataccactggtgccacccgttccgtcggctcctgattgcagtgcttttgccacatcgtctgcggtcgaaataccagccgcttgtaaaatcttgatttctttgttgatggcacggatggcttgattggtttcttccatataagaaacgtcactcgtttgaccggtaccaatcaattcagttggttcacaaaccataatgtcaggctgcagagctgccactgctttagcttcttgcagtgaattcgcgcaagcaatcgtgatgagccccaactcatctgcccgattaatcgcttttgcgagttcatctaatgtcattgggtgttctgcatgattgagaaatgtcgctgctacgccgacatttgctactgattcaggtaagacgtagcccattccccgtccaacagtcatgccatcgatgtgttgaaccgtaatgaacaaatgattcgtagcttgtttgatcgttgcggcatctgcgtgctgcaccgtgaacaagatatcaacgtcatatttttccgctaattgatcggcggcttttgccagtgccaaggattcttttccgtataaataggctttgggattgactacaaaaaagggtgctcgtaactgctttttcctcatgcttatcctcctaacaagtttttgtatgaaaaacgtgatagtaatgtgctagcgtatctgccattccttgattcgctgctttctttagttcaaagtagtcagcaggctgctgttcttgaatcttggtcattgcggctgtaacgaaatctgtaaagatgttgatttttcggatcccgccttgtgcacatttttcaagattttcatcaccagaagaagaaccgccatgtaagactaacggaatagtaatggcttgatggatctcacttagtacatcaaagttgattttaggcgttcctcggtaatgcccatgggctgtgccgatcgaaacggctaacgaatcaacattcgtttgttcagcaaatcttactgcttcatggaagtcggtataaatcgaatcagaaagccccgttgcttccaaactgccgccagagccgacatacccaatttctgcctctacgaccaccccatattgatgggcataatcggcgatcgctttggagcggcggatattttcttcaagcgggtcttctgacgcatcgatcatgacagaagtgaagcctaaacgaatcgcttccttgatgacttcctcatcttgaccatgatccaaatgcaacgctacggggaaggcgcttttttcagccaaatacttcccaatcagggctgcttcttccaaactcagcatatccatatgtgattgggcaaaagccaagatcaatggacaccctagcctagcagccgtttcaacataggtgcgggcactgtctagatcaaaaaagttggctgcgggaatggcatagttgaattcctctgcatggtcaaacatttcttttgtggtaacaagcattttgcaagactcctttattctctgattttcttttcgatttctgcatacatttcttcgataccgatccctgtcaataaaggcaatcccatgatgactttgtctttgatggaatcagggactaccgtggtactcacaacaatgtcgtaatcgtcgatcttgttcatttcatccgcgactttggattgatacaatttgacttcattcgtcagttctttttcttttagccattctttgactttattggttacgatcgttgatgtcgctactccggttccacacatgatcaataattttttcattgttcttcctcctacatgacgctttgttttttaggtaacaccttgttaacatagatcaaaccgatgacaacaatcgcaccgatgatcgctaatccgccccagctcaatacttttgtcaaaccgacataaagccaggtagtccatagtccgccttcagctagagctgtgatcgttgaatttccttgtaagtcaaaattggcagacttagcagctgttgttactaatggtgcgacccaagaagtgatatacaaaatactggtcatataaattgtccctgcgataaccgtccggataatatttccgccaaatactgctgccatcaaacagacaagaaacggaatcgttgctaaatctccaaaaggcaatgtcgtatttcctggcaaaacaaccgctaaaagtatcgtaattggtacgagtaataatgacgaagacaatactgctggatgtccgacagaaagcgccgcatccatcccaatgtaaagctctcttccagggaaacgtttcttcacaaagtcattggcagactcagatataggtgtaagcccttccattaatagagcaaccatttttggcataatgaccatcactgcgccggttttaactgctaattggccagtgcctgccacatcatagccagcgagaattccgatgatcaaaccaatcagaaagcccataactgtcgagtccccaaagacaccaaaacgtttttgaatcgattccgggtcagctttccagtctcgcaatcccggaatacgatcgaataaccagttcatcggtaaagcgaaaacaaatcctggagcagcggtcccgtgtgggaaagtgatattcgggaaaccatagaatttattaatgatcggtcctaaaatatctcccatcaaaagaatcatcattagatagatgacggttgcagcgatccccatggcaaagttgccagtcaaagcatagaccaacgaagaaatgaacgccgcatgccaaatattccagatatcgacattcaatgttttcgtcaggccaaaaataatcaaaacaacatttaacacaacaccgatcggaattgccagacttcctagaatcgtcccataggaaatcgcagctgctgccggccagccaacatcaatcgtcgtcagattcaagccaaatcgctcaaccatctgttgcgctgctggtcctaagctattgcttaacaggtcgatcactagattcaagcccacaaaaccgacaccaactgttaaagcagatgtgaaagccttgcctggtttcgttcccagaataagaccaaaaataaatatcaaaatcgggagtacaacgattgaccctaaatcaacaaaccactgtaacgcatttaacatgatattccctccttattccaatccatactgttgcaaaatcatccgatattcctcaacatcatggatgtctcttaacttttccaacacaccatttttttgaaacatttcgatcaagttttgcagcatttgtaattgttcgtgcggctcctttaatgccaacataaagattaatgaaactgaaatttctttgtcccttgttcccatttcaatgaatggcaatggatctgtcaatgaaagaaagccaacttgcgatctcttgacatactgactatctgtatgaggaatcgccacgccaatcccattgatcatcagaccggttggaaaaaccgcctctcttttaatcacgttgtcaagatacgcctctgtcacacattcattctttaaaaattcctctgtaagtagccgaaatgctgcttctttagattctacttctttgtttaataaagcaatttgctggtcaaaaaacattcggggtccctccttttacaagtttacgataaagttcttctcgatttttactgctaaccacccatcgtatttcttcaggagagttgaataaatcgtaaatagatgcaatcaattcttttgcttctgacatatttttttcagcgattgccaagagaacgactaattgaacttccgtatctccccattttatggctttaggtagtgtaacaaatgctagttttgttgttttgacagtctgcggatcggcatgcggaatcgctacgcctgtctttaatccggtactgcctaattcttctcgtgcataaagtgactgcttaaaatcgttggtgactaaatgatggctcaaataactctctgcaagaaaatctaagacgtcttttttggtgttaaacggttggttaatgtacaaaaatgccggatctagatatttctgcaatagctctgatgattggtatttggatgaatgcagtttcttttcattttcattcaggtttgaaagatttgccgaaatcatggcaatttcttcagttgtcggtaatggtgaaacatagagaacagggggtgacacttcctccaacggaacagttgaaatgatcaaatccactaattctagtgatgtactggctaatttctctgcactgatgatctctaaaactgtcgtagcagaaatcgtttgtttgatccggttaaagatcagctcagaagtggctaatccagagctgcaaacgatcagcacatgctttgtgactttgattttttcaaaagcgagttgaaaatgaatcgttagaaatgacacttcatcttctgtcaagaagagtgcaaagtttttttctagtccgccaatcgcatatttcgttaatgtaaacatggtcgagtattgcttcttgatcaatcgcaacaaaggatttttgactaacatgccatttttcagacgatggatcatagggacaatatgcgaaagcagtgcttgcaacaataagttatcttgtgtcaaatcagtatctagcaaacgggacatcttctcgatcatttcttccgttgtttcgatcacgttggcttctcttttttccgtaatctgcatatacggctcaattccatgagctaaaagcaatgaacaaatgtattggatatctgtctctgctagggaaacagctagttcactttcaatccgttctgcaaaggaaacagcaaccatatacagtttcatctgttttaatttctcaaatcccaaattctcttgctgttccaaatgtcttcctagacaaatccgtgaaagaaaaatttccaacgataccgtcaaggattccacaaaataactattgagttggcgaccaagtgttaaggatatttctgaaatcagtgctgtagtcaaggtaacgatcttcggatcaaacaatgtctgaatggcagagtgatccaatcttgcagaatctgtatgtttttcaagaaaagatttgaaagttgcttgttgaacagattcttcctcctctagcttcaacccttttgcagacattgacgcacgaacttttttcttctgacaaaaagcgaataattcatctacatcttttttgatcgactgataactaacgtagaaatattctgcaaatccttggtaatgcattggctttttcgagaagaaataatttgcaaagataaacaatttacgatattcaggagaatattcgtcaacgattttaccttcagtaacgatgagtttgtagcctttttcccttgcagtgggattcccttcaagcttgacccctcttctaggcaaacgagcaatggtcaacccgtaaggcttgattttttcttccagactcgccaaatctgtatagactgtttttaaagaaacatagagctgttcttgaaaaaaagcggctggtctgaactctttttgtgtcagcagcaattgcaacaacactttctctcttttactcaaatccatttgaccacctccaggaagcgcttccttaactatatattagggaatcagcgcataatagtaaataatatctgattaccacattaatctggtaattgtatcacatagtgaccattccaccactagacaaacagcttttcaatctggagggattcttgtatgctaagtaaaacaatgaatgatagaaaggatgaaccaaatggagcacacaaacgattcattagaccgaggaccttttttccacggaacaaaagcatcattacaattaggcgaattactggaaccaaaaaaagaatccaactttgaagccggtcggatctcaaactacatttacttcaccgcaacattggatgcagccaaatggggagccgaattagccaaaggaactgggcaagaaagaatttatttggttgaaccgactgggccttttgaaaatgacccgaacttgaccgataagcgattccctggtaatccgacccgttcctaccgttctgcctctccgctgaaagtcgtcgcagaattaggggcatgggaacggcattcggaagaagtgattcaacagatgttatcccacctgcagcaactaacagaagatggaaaagccgaaatcattgattgacagttttcttagcacgcaaacgccacccttgtttctggccgtcgaaaagaaaaatattccaacaagtgccatgctacaatgcagaaaagacactgattaaaagaagaaagtaggaataacgatgtatgtaggatttgatattggcggcacaacgatcaaatacggggttcttgatgaaacaggagcaattctggaaaaaaatatgcttccgacaaactacgatccccagtctttctatcaaaatttaatcacaattattaatgaagctaaaagtcgctatccgatcgccgggattgggatcagtgcgccgggcatcgtgcaaaaagacggtttgatgctgacagctggcgccatcaaaccattgtacggcgagaatttcaaaaccacattagaagaatgctgtggtttaacagtttctgtcgagaatgatgccaatgcagccgccatcgcagagaaatggatcggcaatgcccaatccttctccaattacctttgcctcgtcttaggaactggtgtaggcggagggatcgtaatcaatgatcaagtgtatcgcggtgcccacggcatggcaggagaatttggctggatggtgatcgacgccttgccttctacaggtaatagtgaggaagtttcgatcaatcgtaaagctgctgtcgttgatgggctcgttcggatctacaatcaaaaaggcggtcagctggcaggatttcaagcgacgacagatgctcgagaaatttttcagcgcgcacagatgggagaaacattagcagaaacagtgacccaacagttcctgacagatttgtccgtcgggttgatcaatttgatcagctgtttcgatccagaagccattttgattggcggtggtatcagtgccaacccatatttctttgaacgactgcaacagacattaacaactgtcgaaacacaacacgctgccatcaactatttgcggggaaaaacgattgctcctgtgctgcctgccaaattgcaaaatgacgccggattaattggtgcagtttatcagattcatcagcaactcactcgctaaatcatggtatactcgtcatatactcttatgggatagcgaggaacatttatggccgtttttcagcatttgaacttaaacaaattgtcttcagtcgaacaagagatctatcgctttattgtcaataatttagaaaaaatcccttatatgcgagtacgggatattgcagatgatgcccatgtttcttccacttctgtctttcgttttgttcaaaaagtgggattcgattcctttcctgaatttcgcttttatatcaagacccatttagaaaaagtccattatgaagaacatcaaaaacagttatcccttgaagaacgcatccgtggattgaacatgacgattttccatcccgatgtcgaataccaaatcaagaagatggcgcaaacactgcgagatgcggactgtattttatttatggggatgggggcgtctggagcaattgcacagtatgtcgcccgcaagctcgcaaatatcggctacttctgcatcagcatcgatgaattgacttacccgatccgcagcttcttacgagccgatcaaaaaaacgttctggttttcttgagtgtttctggtgaaacaaaagaattgatcgaagtcattactggattagctaataaagcgattgcccaaaaatattgtattacgagaaataaagagagttctcttgcccatttatgtgactactcgatcgaatacgcagtcaaagaagagcgcaaagacatcttcctcgatctgactagccagcttccagccatcgccatcgtggaaacactgattggttatttacaagatgaacctacccctcaatgatgaacgagcacagaaagtaccagacaacgaagaacgccctagccagaacactcgctttacagcagcagttttctgactagtggctgcaatcaagcgtttgtcttgctgctttctgttttttgtaaccacttgttccgactgtggaataaatttcttcctcacagaatttgattctaaaaacgaatgcgcttactttttcaggcaacctttcgctataataagtccatcaaatagagaaaggtgttactgttatgcaaaaatttaatgatctactagaccggtccttggtaccaattgccaccagattgaataaccagcgacacgtcgcagcgattcgtgatgcatttatgttgattttcccgttgacgatttcttcttcattagttattttggtcaacaatatcttattttccaacgatagttttatcgtgcaattatttcaactctcaaaaatctttcccaatttagaaagtgcccagcaagtactggcatctgttgctaacggaaccatcaatatcatgagcgtattcattgcttatctggttgcccaactgctagcaaaacactttgatgcagatgcgacactagttggtttgacaagtgtagctgcgtttatgattttatatccgacttctttctcagttgacggtgtcaatgccatctccacccaatatttaggcgcacaaggcttattcgtcgccatgatcgttgcttgtctggtaggagaattcttgccgaaactattcaaagtcaaacgattacagatcaaaatgcccgatatggtaccgccggcagtttcccgttcgttttctggaatgattcctatcgtgatcatcgtagcagttaccgcattgatcaatttcctagtactgatgattgcgccagagggcatcaatgaattgatctacaaagggatccaaagtccgttgcgtgatttaggaggaaatgtcgttggtgtcttgattttagctttcttacaaacactgctcttctccatcgggattcacggaccaaatacattgaatgccgttcgttcagcaatttttacagaacaagatttagccaacttggatttcatcaatcaaggcggttccttgtgggatgtaccttacaaagaaacgtggggcgttttgaacgacatgtttgctaatatgggcggaacgggaatgacgttagggctgatcattgccattttcatcgcctcgaagcgaccagaacaacgggagatcgctaagatgtcacttgttccaggaatctttcagatcaacgaaccgattatcttcgggttaccgatcgtcttgaatccgattatgatcattccctttatattgactccaatggtcaatattctagttggttattttgtaacagtcatttggccgatcatgccgacaccagcaatcggtgtgccttggaccacaccgggaatcatcaacttgttcctaggaactggcggaaatgcagtagctgcaatcgttggtgtggtctgtctggcgatttccgtattgatatacttgccattcgtgattgcttcaaaccgttcacaaaaaatcgaagcgtaacttttttaggaggaaagaattatgagcagcaaaatgccaaaagattttctatggggtggcgcaattgctgcccatcaagcagaaggggcttggaatgtcgcaggacgcggcatgagtattgctgatgtgatgactgctggaggaaacgggattcctcgtgaaatcacgagaggcatcaaagaagatgtgtattatcctaatcacgaagcgatcgacttttatcaccgctacaaagaagatattcaattattcaaagcgttaggcttaaagtgtctgcgtacatcgatctcctggagccgtatttttccaaccggccaagaggacgagcccaatgaagcaggcctgcaatattatgatgacctttttgacgaactattaaacaatgggatcgaaccaatcattacactgtctcattttgaaatgccttatgcgatttatgaaacctacggtggctttgtcaataaagccgtgattcccctcttcgttaaattcgcaacctgcgtttttgaacgctacaaagataaagtcacctactggatgacattcaatgaaatcaataatcaagcagacggacaggaactattacatgtctggacaaactccgccatgatcatcgaagaagaaagcaagaaagaagaactggtctttcaagcgggtgtcaacgaactgatcgctagtgcggcggcagtcattgaggggaaaaaaatcaatccagactttcaaatcggctgtatgatggcttatgtcccaatctatccttattcctgtgcaccagaagatttgatggcttcggtcaaagccaatgaacgtcgttacttctatagtgacatccacgtcagaggaaagattccgacctatgcacaaacttactggcagcaaaaagggatcaaaatccaaatcagtgaggaagagaaggctttactaaaggcagggactgttgattatattggtttcagctattatatgtcaggaacgatcacgacattggaaactgtcgaaggccaaccgaccgacgatatccctcacgcaaaaatcgtccgtaatccctatatcaccgcgacggattggggatggccaattgatcccgtaggacttcgctatgttttaaacacgatctatcaacgttatgacttgccgctctttatcgtagagaatggctttggtgcctatgatcaattaacagaagaaaacacgatccatgatccctaccgtatctcttatttacgtcagcacatcgaacaactggagaaagcagtaatagaagatggtgtacccgtcttaggttatactccttggggaatcatcgatatcgtcagtttcggcagcggagaaatggagaaacgctacggcatgatctatgttgataaagacaatgctggcaacggaagtctgcaacgcttgaaaaaagattcctttgcttggtatcaacgggtcatcgctacgaacggtgaagaactttaacagaagtcttgctactatcccaaaagtaaaagcgactacctaaaagactgttctttcaggtggtcgctttattaaggtttcttatttgatttcctctatactagaagtgattacccagtcatccatgttcttccctcgttgatacgtaaaaggttcaatcgcttccagttcagcaattcgataaatggccaaaaatttctttcctgcccaacgctccatttgttttttggataaatttaattctgattggtgctgctcaacaaattgttgtgattcttcaggtgtcattttctccgtttcaatcacgttctcaatcatgccacgatgagtaactaaaagatcgccacctgtttccacgaagtagacacggtcgccaacttttgcgcgtccacctaacggagatttgcgccctgctgccccacggatgatggcgttcttttctcccgccaacaatttctgcagctctttgccttctttgtttagatagactagatgctccgctactccttctttgccttcaacccaagaactcaccatttccttttcaccttttttcgattatcatagcagaagaaagcggtttagactacaaatttttcatgtcattttaatcagctagttccccttacaaatgacgaaaaatgcgaatatatcagcaattcaacgaatcgttgcgttctttatttcctgattcaacgattcatttcttgcacctatcaatcaaaggaggctactctgatggtagagattggagaaaatatcaaaaagttgcgcaaagcaaaaaggatgacccaaaaagaggtggctaatcaattgaatgtcacgccgcaaacgatttctaaatgggagcgaaatatcagttatccggatttggatatgttagtcaagctaagtcagttgttccatatttcaaccgatgctcttttaggcaatacaaaaccaactttttttgcttccttattctcaaaaaagaaaagagggaaaacgatggaaaaagtaccagcaactccgtccactatccaaacagacaagctgtcctcatctgagaaacagatcatgatttttagtgtcagcagctggataaccgagggagaactgcaaacacaacgtctgcagttaaaattacagaaatattttactgttcaaaggcagccgattgcggtagagatgtacagcttgtcaaaagtcgcagaaaaagcgccagctgctgatttgatcctcctgactcctgaagctcaatttgcattaaaagaactacaagaagccgtaccacacaccccgattcttttgcttagtagccaagagtacggtctactaccgattgaacaaatcgctgaaaaaagtttgcaagccatgctttagagcgttcaacaaaaatagagcgtggaacaaaagtaaaaaacacttttgttccacgctctaaacacgtctaaacggtgagaggcgaagcaactccttcggaaataagtcgaaatacccccaaatttgaaaagtaatttccgtgtattcctccttatttctcggagtttaacacttctgtcccagcctctttcttatcctgtattagattttcagcaaccagatcaagctgagcgctgcaattgtttgaaccaaaccgactgaaagtccatagaaaaggaacttaggtccttctttcatgaatttacggaagtctaagcgcaagccgattgctgcaagggcgatggtctcaaaccaggtactgatgaaatgtgcagcatcattcaaccaacttggcaatgcaacgaagctgttcaagatacaaatcagcaaaaaacctaaaacataccaaggaatacgcaacgatcgtttttgttttacgacggatgcggattgattttgttgcgacaccattcgttcgaaaatcaaaaccaccacgaccaataaaatgatccgagcgatcttaaacagcatggcatatttgacaatctctgcatcaagtaagctggcacccgctacgacttgtcctacggattgtagcgttcctcccaacagtgcgcttttttgtaaaacatccgaaccaaacaacgccagaccaagaaacggcaaagtcaacatcatcactgttcctaacaaattgacgagtgtgatgatctgccctttttcttcatcatcggcttggatggctggtgcaatcgcgccaatcgcagaagaaccgcagaccgcattgcctcctgccatcatcaaactcattttttgattgaatcccaacttcttgccaatcaagtaagccgcagtaataacgatcgtcatcatcaatacgatgaaaacaaaaccacgaatccccatctcactgatcgtttgaaaggtaacagtaaatcctagcaatacaaccgaatattctaaaagccgactttctgcaaatttcgttccttgcgcatactgtttttgattgaagaacgtattgcctagaacgatccctaataaaatcgccaaagtcgctcctcctaattgcggcagccaaagagccaagactttcgctacagccgctacaataaatgataacaacaagccaggtaaaaatggctgcagattgacgggtttgattttttcaacattcattcttgtccatcctttcatactgccttatattatacacagcatttttcatctataacatttattgatataatagttttaataggattttataatggaagtgattacactgctggaaaaactagaaacgttcaaaatcgtttacgaaacacagaatttctcgaaagccgctgagttgctgttcgtgtctcaacctaccgtctccgcccatatcaaacaattagaagaagaattgaatacccaacttttcattcgaaatggccgcatgaacatttcagcaaccccacaagctcacctgctttatcaaagagggctgaatttattggacgattggcagcatctctatcaagagatccaacaaggtacgcaacagttggttccatgccggataggtgtttcccatacttttgcgatctatttgctgccggatttgctgatgcgcttatacactcgctttccccacatccaatttcaagtagagatgatgaactctgacgctgtcctgcatgcggtagagcaacacgagcttgacctagggatcattgaaaagcccttatccgctgctaccgtggagcgatacccattgatgagtgaccagctagtattggctggcgatccggcagtcggaccgtggcttgtgcgagaacaaagttctggggtttattattatatgaaacgctatctagaagagcaaaatatccagacgcctattttacaaatcgccaataatgagatgatcgttgcattgttgaaaaaaggcttcggctgttcaatcatttctgcacgagctgctggagatgtcccccatgaagatttaggcgagcgttatcgccgccaattttatttggtcaaacggacccgcgattcctataaagaatttgctgcttgtgcttcttttatccgacaatggcaggaggaataatcggtgtctcttgatgccatcaggcaacttcttaatcttttcttacgattgaactgatttttttggtaaaaaaactcattcattgtttcttaattattttgtgatagaataataggggctctgacgttcccctataaagtaaaacagatgtgaacgaccacctagaaaggaccctgaaatgaaggaacagatcaaaaacaaattagctctcttacccgatcaacctggttgttacttgatgaaagacaaaaatggtacgatcatctatgtaggtaaggcgaagattttaaaaaatcgtgtacgttcctattttacaggaagtcatgacacgaaaacggaacgcttagttcaggagatcgccgactttgaatatgtcgtcactgaatccaatactgaagcgcttttgttagaaatcaatctcattcaaaaaaacaaaccaaaatacaatattatgttgaaggacgacaagtcctatccatttatcaaagttacgaatgaacgctatcctaaattgatcatcacccgcaaagtgttgaaagatggtgcgctttacttcggtccttatccggatgcccgagcagcgaatgaaacaaaacggatcttggaccgcttgtttccattacgcaaatgtggtgcatcgcaaaaacgcccttgtctctactatcatttgggacagtgcgtctgtccttacgttcatcacatggatcccaaggaataccgaaaaatcgttgatcaagtcaaacactttttccacggtggccatgttgagatccaaaaagaactaaaggaaaaaatgggcgaagcgattgaatcccttgaatttgaacgtgctgcggaactgcgcgatcaactccaagccatcgataccgttatgacgcgtcaaaagatgactttgaccgatctgcttgatcgcgacgtcttcggttacagtgtggacaaaggctggatgtgtgtccaagtgttctttatccgccaaggaaaattgattgagcgggaagtctccttgtttcctttttacaacgaagcggaagaagactttttgacattcatcggtcaattctaccaaaagaacgagcacttcatcccaaaagaaatttttgtcccccaaacgattgaacgggaacctctagaagtgctgctaaaaacgaaagtcttgcagccacaacgaggtgacaagaaaaaattggtcgacttagccaataaaaacgcgcaaatcgcattggatcagaagtttgctctcatcgagcggacagaagaacgaaccatcggggcggtggaaaaattaggtgaagccatgggcatttcggccccttatcgcatcgaggcgtttgacaactctcacattatgggaaccgatccagtttctgcaatggtcgtctttgtggacggcaagccttcaaaagatgattaccgaaaatacaaaatcaaaaccgcacaaggcggtgatgattatggctcgatgcaggaagtgatctaccggcgctactcgcgagttttgaaagagaaattgccatttcctgacttgatcgtcatcgatggtggcaaaggtcaagtaggcgccgcacaagatgtcttgcataaccagttaggattagatattccagtagctggtcttgtcaaaaacaataaacataaaaccagcgagttactgtttggcgatgatctgcagccgattcagctcgaacgaaattcagtcgaattctttttgctgcaaagaatccaagatgaagttcatcggtttgccattactttccacagacaattgcgcagcaagaacagtttctcttcaagattggatgaaattcctggtttaggaccaaaacgtaagcaacagctgatgaaaaccttcaaatcgcttaaaaacattcaagcagcttccgtggcagagatccagcaagcgggcattccgcaagccgttgccgaaacaattttagaaaaattatccgatcaaaagaaaaccacgtcctagaaacactcggacgtggtttttgctggaatgaatcatcgaattgtttggaaaggccactaagacataaacgtgctctcaagggaatagcggaatgtttcgttccctttcaggcctgtctcttagatggctctttcacaaaattcgttacccagatatctagatatgttttcctaagcaatcaacaagttgacacgcaagccatccagttcagctttctgctcttgtgtgatatgagaatctgtaatcaaataatcacattcatctggtgcagcaaattgcttgaaactccgctgattgatcttgctggattcacatagaacaattttgatccgactaatattgatcaggcttttcttcatttcagccgtttcgtaattaggagttgaatgcccataattcttgtcaaaagaagtggtgcctagaatcactttatccacggaaaaacccgctaatcccaatgccacagaactgcctgaaacatagggatagccatttcgaatggtaccgccaatgacttgcacttgataattggttttctcacttatcaataaggcaatctccaaatcataggtcaaaatcgtcaaatgcttcagtggactgttgatcaatttttctgcaaacgcacggcaagatgttcctgtatcaatcgccaaaatatcattttcttcgatcaatcggaccgcacgttcagcgatgcggtatttttcattggtaaaggcccgatttttggggatcgtctcaacacttcgttgaaattcacgtttaatcacgccaccgtgggttcgagtgactaacccctcattctcaagttctcgtaaatcattgcggatcgttgaacccgtcacattgaaaagttccgccaactcagcaacttgcatccggtttttctcattgactattttaacgattgattgttttctttcctctgcgtacaattgatcatccatcttctatcacctttttgtgttttgtttcattataaaagaaactgaaaatggaagcaatcaaactaaaatgattcgtcaaagacaatgacatttttcaaacctactgcattgacagcattttcaagcgcctgaggaaactcattgattgtgtaacattttgtaatcaattttttcaacggaattctgccactagcaactagctgtgcggatgttcgatagcctgccaagctggcacgagtacaaccaaaaacgcgtaattgtttgtaatgaagaatgttcgtgttcaatttgacttcctctttctcctttggcaagccgccaaagaagagacagcgaccgtttgtcgccatataactgaaacttgcttcttgtgcctgtggtgccggcgcggcaataatacacaggtctaccccttgaccattggtttcagcaaaaactttttcctgcaatccatcagaggtcaatggaaccaagggttctgttgcaaagttttaaataaagaataaaatcccttacggtatctatgatttaagctgggattcccaataataccttgatttcagtacagaccgaaaacccgaagagagtgccttcttttcgggttttcttatataatcctcgaatggcttccatgcctttaatcgtggtagaggcagtgcgtaaacttcgatagaatttattgcgtctctttactggacgatggtcttgttcgatcaaattattcaggtatttaatggtacgatgttctgtcccttgataaaagccgtattcttttagtttcttaaaggcacttgtaatagagggggctttatctgtgactacaaccttcggttcatcaaactgcttcactaaccgcttaagaaaagcataggctgcttgtgtgtcccgttttttacgtaaccaaatatccaaggttaaaccatctgcatcgatggctcgatacaaataatgccattttcctttaattttgatgtacgtttcatccattttccatgaataaaaggattttttatttttctttttccaaatttgatagagtagtttgccatattcttgcacccaacgataaatcgtcgtatgagaaacgttaatgccacgatcatataagatttcttgaacttcacgatagctaaggttataacgaagatagtagcccacggctacaataatcacatcctgctgaaattgctttcctttaaaatgactcatcgtcattcctcctgctatctttttctattattctaccttatctgatagtagatttaaaactttgcaacagaaccgtactggcgaatcacttcccccatttccatcgctgtggtctccttttcggtgaatattgataactactttgatcataacaagaatccgaacacgcaacaattgactaaatgaatcaattttctaaaaaaaaattaaccagtggttataagagcaatcaaagcggacacagaaaacttgtcccttagttgtttttgtagcaatcttgacgcaaaaaagacacccatctctgagtgtcttaccaatgactgattccccatctagtaaacagtctttatgcttcacttatttgacgattttcttgaccatgtcgaataatgttttcacatcttctggtcgcgtatcgccagtttctttgtcaataatcgaactgtaaatatgcggaatcacttttttaacgcctgcatcaatggcgatttgcagaatttcttcgaagttttccagatcaattcctccggttggttctaaataaaaatcatatttggcgcaagcttccgcaactgctttgaattcttctttgtgcgctaaccctttcattgggaagtatttaatggaacttccacccatgtcttgcagcattttaatggcggtctcgatggggacctctgccgccggtgcctgtgaacttaaaggtccagtggcaatattgacgtaccctaccttgcctgttggtgaaaccaatccattgatgactgtatcgttttgtcccaataaagcacgggaagttcctacaccagtgaatacttgattgacatgttgcggttgtaaagtaccagatagacgggaaaccatctgactttggttgggatctccggcgcccaacccaacggacaatgcattatccgttgccgcttgatattttttcatgtcttcgatcgctgcttcatcgctagtatagttttttgataacacacctagtacgacatgtcctgctgctgcttcataacaagccttcgcattttcaactgaatgagccaatacatttaaacatacgcgatctttataataatttggaataactgacaatttaaaagcctcctacatgatttcttttaagcgtttaatgattttttccatttcgttttggttgaccgagcgaatatcaaactcaataattccattatttgcttgatattcacgtgtgtagactgctgggttttgtgcctttagttcttcaatgacttctttcgcagatttcttgccagcaaccgtgacacttgcgcgataaatatctctcccggcgccatcttgaacaattttcgctgataaatcaggaagttgattgatcgccgccacgaaaggtgccaatcgttgtttcatggactcaccggattcactgccattttgcaggtaatcttctactgcttgtgtaaagcctaaaatattgtctttgccgattttcattgcccgaccgatccctttagactgtagacgaatccattgaatgtattcctttttccctatgaccagaccggcactcggaccttcgattgctttggcgccagaatagataacaaggtcggcacccatttcactgtatttgaacaagtcttcttccgcggctgcgtcaacgatcaatggcaagtgatgggctttggcaacttctaccatctccgacaccgttagcatacttttctgcacggtatgatggcttttaatatatagaagtgcggctgtttcttccgtgatcatcctagcgacatgctccggtgtacacatatttgcataacccgcttcgacgacttgtccacccccttgagcaaccattacttcaaccggtgtgccgtagtctacattgtgacccttaggtacgacgatctcccgtctcgtgattttttccgtgtagggatgataaacatggtacaggtcgccttgaccaatcaaagccgcgacagattgggcaatccctgctgaagcagaagaaacgatctgcgcatcttccaccttcaataactgagaaaggtaggcgccagttttcacagccagatcactcatttcaaaaaaatgttcgccgccaaatcgttgtgcggctagcacattttcagatactttcgagacaccgagtatcgtcatttttcccgaggcattgatgacttcctttaaagcaaacttttcatagctaattgtcataaatgacgcctccaataattgtttggactggaacaatttgttctttcgctatccgtgtaaccccattggaatctttcagttctttttcattttcgacaatctcaaagatcgtcaaatcggcatcaaaaccaacagtcaattgacctttcttcgccaagtggaagtttttggcaggaactgaggtgactttctcaataatctcttcccacgagtagcctactactctcattttttccagcgtagtagccagatcaaagactggaccattcgtacgattgcggatataaatatctgtactgatcgagttggctttgagacctgcttttaaggcagtttcagcaacgtggaaattaaagctgtctgttccatgaccgatatcaaagacaacgccttttttatacgcatcccaaacaaagtctttgatttgatccgtggcttggtctaaaatgccgttcggttttccattaaaacaatgggtcaatacgtcgcctttttccattcttgtcaatacttcttctaattcaggaggcgccgaaccaatatgaaccatcaatggcaagtcattgttttctgattggatttttttggctaactctagtggcgtgatgccattctcgccgacaactgttttgctcattcttgccttgatccctacaataaattccggaagctctgctaatgcagctctgactagatcttcttggatttttgtcaggtcagcaagttcatcttgttccacgatcccccatttagaaatgttcattagtgcgtacacattggttttgaccgatttcgtcagttgataaaaatcgcgaatattttctgcgcccgtagtccctgcatcaataaccgttgttactcccttttggacccctatttgatccggataatcataataaagattcatcttttcataacagtgaacgtggtcatcgatccaaccggcagagagataggaattgccggatagatcaatcacttctcgtgctggctcattgatttcggcagcaactgctttgattacgcctttttccaacgcaacttccactttcctgccgtcgattaatttgccatttttgattaaagtatcaaacatttcattgccttctttctattgaattaccgctgggaagatcgcacctaagatcattgcgcctagaatagcaccaccggcaattggttttttccaagcataaaaagccaacgcgcctaatgtcgccccaataccaatgggaatagaggccgcacaagcactcaaaatgatcaatgggcccaaaaatcggccggaggaattgccggcgcccatcatgacatccgcaccaaaagttgaatttgactgattgatggtgaatttgcggatcaacacgataatgccgccaacgatcagacccaagaccaacccagtcaataacgagagggcaaaattatcgattggtgctgttatcttcatgcttaggagaatggctggaacgccaatcccgatcccagtcaaaatcgaaccgcctaagtccaagatccctaccaaagagccttctaagatccgagcaaataagaaactcgccccaaaagctgccgcagccccataggaaccgccatccaagccggcttttagcatcgcaacgatcgaaacttcattgaatgcaccgacgccatacacgacatacatatgggttcctgagaatacagccgctgacatgattcctacgatcaatgggaaagaccagtctgcaaaccaaaaactcttttgccgttttgcttctactgcttttacctgttcttctgtctccatgatttccctcctatttcacactaaagatgttgtgcaagttatcaagccaatgaggtacttgaagttggaaactcttgatcatttccatatcaaatccacggaaaaatccgctgaaaacaaagagtaaaacaatcgcaatcatcatactcttcgtgacccgattccaaccactctcatcgacgcctttaccgattaagattcctagaacaacgccaggaaccgcattgcccatgatcagttgcgcaatcccgccaaaaagcgtcccccagaaacctgttcgtttccctgcatctaaagccgccaaccagaagatcactggcatcacggtattgatcagaatcgtcgctgccggtaccaacacggaaacagcggttacttgtaacgcctctggaatcgctgcagctgtcgtattcaagaaagcgactactaacgcgccaataacagcgccaatgatccccatttttttcggatcatgcattgtctggctgacatctttgtttttggctaagagagccgcagctgcccagttaggcacgatgcggtgggtcacatcttgcgtgaaagctccagcgccaactgaagaagcccaagcattaaagaaaaaacctaatccaaaggaaaaatgggaggcagcatcccccatgcaggcattcatctcccctaatgttctaaaagctcctaatccttgcgtactgggtgcatgaaacatacgagctgctccaacagatgcagagaaaccgagtaagcccccgatgatgatcgatttagttaaaataatgacaaaatccacgttattccctcctccttatgattcaaatcaaacttttttcgttacaaacggtaaaacaatcccattggggtcttctgttaggtgttgagtgaatggtacgtctgccaaacgtatttctgtcacagttaccgtgacagaaagttcgacttcataattcactcgttgccggggaaaaaagaagaatagaaagcgttctgtgtatttgttttcgaccgccttcaacacctccacattgattggttcgatgcgcaataatactttcgccgatgccattagtttgttttggatctctgcgagtgctgatgcaaaggcatgttgcttagtttctcctttaccggagacgatgactttttgctgagttgtcttttgaacgctcatctcgtatgccctctttctattttccgtgctttttgataaattcttccgtcaaccgtttccctaattcctcttgatccataaaaccgaaacctagcacggttttcccatctttgatggcggtgatcccttcttcaatcgaacgcatcccatgacgttctggatacccatatttatttgcggctgttaaggctccagccccaccgctcccgcaaaaagaaattcccatatcggcattctcttgttgcatgacatcacctaaacgcatatctgcgcccattcccggaacaacaactgccttgccgccagctgcttctacacctttagctacgttttgtccttttcccatacgatctgcaataactactgtaatcatgattgtttcctcccaaatattaattattttttgctgtttcaaaatgaatcgataaaacatacatctcatcttcacctaaatcaccaatcgttcgaacgacctcgtcggaaatcgcaatggcttctttggatacttctcggaacaattcccgatcaacagcgggaatcttttctcctttttgagagcgtttcagcatctcattcaagtgattgatcagaatcgtccactgaagttcagtaggttcaatggcatattccgcaagtcgctcttcgactaaagcaatcacttgttttaatttttcctggttttgactttcctcgatcatagttatcgcttctgctgacagtttcactagcttgacgctccttcttttatatatgaaaataatgcgctgatttctgatttgttgatgcctaaattattttcagcaaaaattgcttcaatttctcctaccaacgcttctcggttcaaaatgatttggtcgacttggctgccttctgctaaatattgctgatcaaatgtgatgcgatggaccatcaagaaaacatgaagcaaaaaggcttctcggtattcttggatcaattcagactctaatgtgacaagtaactgttcatagatcgtatatgcctttaaaatcagttccttgctgaagtcttccagagtccccttattgataggtgcttcattgagaactaattggtgccgcctatcctgacttgttgaagcgaggatttttttgatcatctgctggatgttttgcagatcctgctcagtcggcagtggatggactttgatgaaaggccgatcaatgccattgatcggaaaaatactaatgactagatccggatccttcgcggcaatcacctcttgtgcatttaagactgaagcaaaagccacaatagtaatattgttcaattcttcgttgatcttttgcttaattaaactcgtcacacctaaacccgttgaacaaacgtaaaccgctcgaacacttcgcaagtcttcttctctttcgtaggaaaccagaaagtgcaacgcaatgtaggcaacaaaagaatcattgatcaagagtttctcgtttatttcttggagtgctgcttgattgatagcagcaaacaattcaggatatttctgtttgatgtcctctttaaacggattgtactcattgacaaaatttttccttcttgagagacgcatagacaaatgggcgtagagattcgtcaataattgagggtcttgataaaacggaaaattgattttcttgcttaccttataaattatattctctaccaatttcatgacatcttgctgatggatcgtatcaaaggtatcactataaatatagtcatactcatcttcaaacaagggcaattgatagtaatcaaacacctgctgcatcacacgatacgaaagatcatgtttgtctatttcgtgttcccggatcaattggtaccgtccaatcgtggattctttgcgcaagcgaacagtggcaatcgctacacggatcaggatatttagtagttccgcataatttagtttttccagattttcagattctagtaagtacctcatccgaatgatgacttgattaaagacctcctgcaacggtgttgccttcgcagaatacatttcgaagcattccgtttctctgccatttagcaataaagccattaatttataaatgtcatagtctgtaaactctttttgcaaaatctcctcgatcgttaatcgtactaggcgttccttgccagtgatccaaaatccctttcgtgtctggcgattcagaactaagccttctttgagataatggtattccaactcatccaaatcattcatgatcgtatctttacttacttctagcgcattggccagctttagagccgtgatcgcttccttggtaacaagaagcatgattaacaggcgattgatccgtaagccttgatcggcaaacagctccagacgattgacatccatcaattcgctttttagtttgattcgatcagaatcactcacacttagccaaataccctggctccgtttgctgtgcagttcttgattccgctcaatcaaccaatcacggatatcctccagatcatatttgatcgttcgtacactgacactttctttttcagctaactgtttgatcgttaccggttctgtcatttctaacaagtaaatcaaaagttggctttctcttttggtaagctgctgcatcgttctcgctccttacaccgctaaatataagcgttttcttaactagtcacaatatgaaatgtttgcacttaacttagtgcaaatgatcgtaatttaacaactcatcaacttattcacaagcttatcccccctcaaaaccgcaacgtggacccattaattattgcactaagtcgtccctttacaacatctcgatgccattttttctgctttttttattttatgacactaatccaactgacagatacccttcacctcaatgtatcagaaatcgattccccgcatgacatcattgaacagcaaaaaacactttccaacttttggaaagtgccaggaaataggatatgaacgtgttcgttttctcgactgattgttatttaatcaggtgattatgcatcaatgaaaccgttagacatatccatcttgattaactttgaacagctatttattgaatcaggagaagaaacagttcaagatcaatacacttgagaaccaatgaaaactcactaatgctatgccatttgtcattaaaactacttccatttgtactcgcctacttcatttcaaactctttgccgaattttattagatacattttttctaaagtgtcctctaacaaatacaacttcctaggggagataaatgcattcttccagtcccaattcaccaaatcatactttccaatgtcagccatcgctcttacttcttcaatcgataagttcaattcttttcttagttcatcgattttttggatttgtttttttcttctgagagccgttggtacgtttatcgaagaaatgaccaccataaaccctaaaaaagaggtccattcataataaaagtcaaataccttacatacaaataacagaaacaagcctaacaagaaaaaaataatcgaatacaaccaatcgatcttttcattagctaccatctttttcacgttgatagcctccctcctaattaccttcaagacaaacaataaaaaaagaaagcaactcgcttgatttcagccgctcccagctatattttactatggttctgattgactgttcgttaaatatttttcactattcttctatttttttcaaccttaaccgcaacacaagatacatcatacctccaaaaaagcaacctccgagaatggaagcaatgatcctgtctggtgaaacgatgtacggaaggaaatcttcttcatccaacatcatactaagtactccattcaataagtgaatcgcaattgcaaagtagatacctagtccaattcctttaagaatcgtcttcttcttttcttttgccatctctttggcttctacttcgttttctgtcaattttaagcgtgccgtggcaaacagaacataaccgcaaacgataaagactgtaaagaatatattacagccaataaaaatccataacgccagctctggtttcttagatgcaaaaaccgttaccagtaaattagcaaccagcgtatacccaaacatcagcataaacgcattattgccaatatgttctacttggctttttttgtattcatctaagacaccagaaataccataaaaccgcttgattatttttactgccaatccttctttagccttcatcactttcaacctcccaaaacaaagaatttaaatccgtttgcagtactttagcaagcttaatacataaatcaagagaaggattatacttattattttcaatcaaattgatcgtttgtcttgccaccccaatctctttagctaaagcattctgagataaattcatcttctgtcgaaattctcggactctattcattcttttctcctatttagtcatatatatgtgacacaagcgtactacttatctctttttctgtcaaatatatatgacatattaccaagctagtgtaaactcccagcaatcgatctcacaagctttgtagagagtataaaatttataatccatatcagcaaatctaggctagaagtacgtaaaaaagacccttccaatggaacagaccatcattacctaagataactattctagtagaatggaataagctttgcatgttccacattctgtaaccagcatctttcgttgaggagacgatacgctaaaaacttctttcttaatcctctcatcatagaactcttcttttttctcgaatcactttttgctatactaattgaacatatcgaaatttttattgtttatggaggaaccatgcaaaaatttattggaaacaaagctttttacaggactgttttaacgatcgccattccgatcatgatccaaaatgccatcactaattttgtcggtttattagacaatttaatggtaggacaaatcggaacggcccaaatgtctggcgtggcgatcgttaaccaactaattttcgtttttaacttaagtatctttggcattgtttctgccggtagtatttttggtacccaattttatgggaaaaaggattatcaagggatgcgagatgcctttcgtttcaagctagcgggcaatcttttgatttgtttgttggcgatggggctgctgtttttttgccaagattttttgattcgcttatatttacacggtaccggtgacagtgcagaactgacacttgctttgacgtctgccaaagaatttctagtcattcttttgtttagtctgccgttttttgctatttctcaagcttatgccagttctttacgcgaaatgggcaaaaccatggtaccgatgtttgccagcagtatcgctgtcgtcacgaacacagcattgaatttcttattgatttttggtttgtttttcttccccactttaggggtgcgaggtgccgcgatctccacattgattgcccgcatcgtcgaatgtgctatcacgatgtattgggtacatcgccatgaggaagagaatccgtttgccattcgggtctaccatcaattccatgtccctttgcatttggtgaaacagattctgcgtaaaggatcgccattgatggcaaatgaaatcctttgggcgatcgggcagacaatgattattcaagcttattctgttcgaggactatcagtgattgcttccttgaacatctcatccaccgtctccaatttgttcaatattgtctatatggcccttggcggtgccgttgcggtcatggtagggcaacttcttggagccgctaaatttgaagaagccaaagacagcgcccggaagctgcttttcttttccgtcatgagttgtcttgtacttggtcttttgatgatcctagtcgcaccattctttccagaaatttatcaaaccgaacccgaagtcaaacatctggcgagtcaattcatcaaagtcgccgcactgtgtatgcctatgtacgcctttaatcatgccagctattttattttacgttcaggtgggcaaaccttgatcaccttcttatttgacagtgtctttacctgggtgatcgtcttgcctctagcctttgtattaagcactcacaccagtctttcgattgtcttagtctacttgttctgccaactagcagagctgatcaagagtgggattgggtatcgtttgattcgatccgatctttgggtgaagaatattgtgcattgaggaaaagtttcaacataggggatgaaaaagatggatagtctggtggaaatgagtgattttttatcctaaaaataaataagacattcctaaaaccgattgtgattttgggaacgtcttatttattaagattatatttattcttttgaccattgaaaatatagacatttcatacaaaaactgttttcaaaaaatggtagctttactaaaaatgactccgcaaaatgatcatagtaattttttgctattattgaaataatttttttccagtccaacttgaaatttcgtaactttgtaaagtttttggaatcttactgtaattcaaataagtagcattttcgtaccaaccatctgccactacaataaagtttgcttgtgccccattcatagtgcccgataatgccccttgggtaaataccgtatgtcctccaatacttccgttaggtttatagtaaaaataagtaaatgctactggataactctgtgcaattttcgtttgatatccgaaaacgaaggagacacttttctctgatatgttaaactaacacttttatcttttgcgtattttactagtgctggtccaatttggtcaggttgtgtccctccataagagattccattattggttgaagatacggtagttcctgaatagttccacaatgaattgtatgccacctttaattccgaatcatttccagaattaaagaatctataggaagaacttatagttgctaatgcatgtactgcacaagcgtatttcccagtggctttttcagatctactctgggatagcgcattaaacattgctaaataatgtgcacttgtcaagtgtaaattacttggataattactaaataccgcgcttgcatggtcatactttgtagaacgagaattatatctagaaaagtgttctatttccatttcagcaacaggctgtacttcttctacatacttttcaaattcatttagtgaaaagttctcaccgttggtactgatgactgaatctttgtcttctacaactaaattatattcagtgggaaaagtctcaattaaataagattcctcagtattatcaactttcatttgtgatttatctgctaaaaatcatataaactttttgatccaagttctatagaaaattgagcaatataagtaccttccattcttaaatcaattataacgtaaccgtgtgtcacaccctctttaataaaatctacactataagaaataattttttcttctgtatcataaataggaattatagaagaaacaaccaaatcttcagttcctttaaattcttttgcaaagtttaaagctaaattggctaagctttcatcagttatttcaacagcagactgttcagaataattttcactgatgtctgcttctgaaatggaaacttcttttgcattagtactcttctctgtatatagaaacacaaaacaacttgttaccattacccataaaattctactgattttcttcatttttaactactctctttgtttgccaaccagcgcaaccatagaacacaatgtattattcattccacttaaaaccatattctatgaccaacattttttcacttcatttacctagcatttacaaattttatgacagtttaaaacattcagtagagcttaattgcttcgagagtgtaaaatattttgtgtaaatagaaaaaaggaagtcccttctgtagaatagagttaccacaacacattcacagaagagaggacttccctatgaacgattttactacagaaattctaaagactctagcgaacaaaggcgatttgaatgaattattccgtgtccatttggagaaagcagtcaatacgcttctcaaaacggagttaacggctttcctagattacgaaaagtatgatcgcattggttttaacacgggtaattctcgtaacggctcctatgaccgtacggtcaagaccgagtatggggaacttcatctccagattccgcgcgaccgcaatggtgagttcaagcaacagactgttcctgcttatagacggacgaatgacacgttagaggagaccgtcattcacctcttccgaaaaggtattaccatgtcggaaatcgcagacttgattgagaaaatgtatgggcattactacacgccccaaaccatgtccaatataacaaaatcatttacagaagaggtaacggcgtttaaagggcgggagcttcatgaccgttatgctgctatttatatggacgcaacgtatattccgttaaagcggaaaaccgtcgccaaggaagctattcatatcgcagttggcatttgcccggacggatcaaaggaagtattgagctatgcgattgcaccgactgaatccatcacgatttgggaggaaattttattggaccttcaagagcgcggtttgaaaaatgtcctcctgttcatcacggatggcttaaaggggatggtaggagcgattagtcggttctatcccagagctcgttttcaacattgttgtgtacacgtttcccgtaatatcagtcacaaagtgcgtgtcgatgatcgtaaggaagtctgtgatgattttaaaatggtgtatcaagcctcatctaaagaggtggcgttggaagcacgtggtgcttttgcggaaaaaaggaaaaccagctatccaaaagtggttgaatcgattctttcgaacgatcacttgctcactttctatgatttccccttggccatacgcaagagtatttattctacgaacttgattgaatcctttaataagcaaatcaagaaatacagccaccgcaaggaacagttccaaaacgaagagtcgatggaacgtttcttagtctcgtcttttgatacttacaaccaaaaattcctaggtcgcagtcataaaggctttcaacaggctgaaggcgaacttgaacaaatgctaagccaactgattgagaattagaaacaatctgcagtagggaagaatcatttacacaaaattattgacgctcccggtaccggtggtgggaagacatatttcattcttacaattattgaagccctactacgaacaaaagctaaattatttattttagaccccaaaaatgcagatttagctgatttaggtacagttatggaaaatgtctattacaagaaagaagatatttctgaatgtatagatgatttctacaatcgaatgattaatagaagtttagagatgaaaaaaatgtccaattataaaacaggagaaaattatgcttatttaaaacttactcgatttcacttttaatacgaccacctcccataaataatatttaaatttatggaaaggaagatggtctatgaatacactgaaagaagattttattttagcaaaagctggaaatgaagaagccattgaagccattcttaaaagattcagctcgttgatgcacaaaaaatcgtggagaaacggaaaatacgatcaagattgttatcaagaatgtatgattgcagtctatctagcaatttcaaaatttgaaatcaaggaataagctcattttggggagatgcattttgcttctccctttcttcttatctacctcaccttatccattaaatttttcaattcagttacatttgttaactcgattatattaggaattggctgctttattagattattcctagtgagttttgttaaatatctactaagtgtttctggagtcatccctaaataagaagcaagttcttttttcgtagtttccaattttatctgctctgtattttgctttatattttcttctaacaaatactgaattaagcgtgtttctgctctttcagtcgtgattcctacagttaatcgttctgtattatcaagacgtctcgccatttctgataaaagttctagagctatttggggatgcgatagtaaaatccgcttaaagttgtccttttgaatggtacatactttagttggtgatattgcttctataaagcatccataatgttgttcttcaaataatgccagctcgcccacaaaatcaccctgttctaaaatacgaatcacctgttctttacctgaagaacctaagcgataaacttttacttttccttcttgaataagataaagagattcaagtatatcttctgcttgatagataaactgtcctgcagaaaaagcttgttctgtaatatcactttggataaattgaatttcagtgagggacaatccctgaaataaaggcattgtacttatacaatgatcatattttgtgaaatcaatcatgttcttactactcctctttttgtggttagtatagcataaaaaaacgttcactcatgtaatatcatcagtgaacgattttctatacttatttttctttatctgcatcataaagaacagcgcgtactgaaacttcaatggaatcctttactgctttagaatatggacaaactttatgcgcttcttcagcaattttttgaacttcttctaaatctaaatcttgaattgcaacttgaatctcaacacttaatttaaagtccacatcgtctggctttttgtataattttactgtatgtgtaacttgtgaagattgatgaattttacgttgacccttaacaatttctaatgccccgtgaaaacaagcactgtatcctaaagcaaataattgttctgggtttactccactcccagatcctcccatttctttaggtgtagaaatcttcacttcaaatgatccatcatttaaatagctcactccatcacggccaccggtattagtcgctgttgtttcgtaaatttttttgtaatctgacatattgaagtcactccttttcacttttatggtcctattttaggaaataaagttggtgttggcattgatctaaatcaagaatcataaagttaagaataactttatgaaaaaatatcgttggatgcagtatatctctttacttgaactttattagctatgtttattggtctttttgttaaggtaaataaatattaacaaagctattattgcgcctccaaaagaaccacctatcgcaataaacacatccactgttccttgaattcgaatgatatttgatttagttataaaatggatgaactatgatataattttttgctttaggtttccttcagattccatcagctacaaagttgctacccgtgcagggtacatcaaaaaaggaaatgccaaagcatttcctaaagtgtgatttggtcaaaacaacaccatttgacaaagcactgaagaaactagaatgacttttcatcaataaaccctattgttcgttcagattttccatttactccaacacaaaggagtttttgaaaacaaattcactcctccctcctaaatcttcttaaaaaccattattctccgccaatgtcttaaaccattccccagatttcttaatcgtcttaatctgagtgtgaatatcattagcgattaagccgtagcggttacggtaggcattgctccaggaccagcaatcgataggagtccatagatggtagccaaagcagttggaaccttcttcaatccctttatgcaaccattggagatgctctttgataaattctatgcggtaatcgtctagaatttgccctttttcatccataaagcgttcttcccgagaaacccccatgccattttcagaaacaaaccaaggtagattgccataattatcgcgaatattgatggcaatgtcatacactgctttgggatagatttcccaacctttgtcaatattcatgcgacggccaggcatttgatatgcatcataataacgatcaggcatccaggcacccactgaatttggagcaatgtcaggtgtcttgacccggtttggatgatagaaattcactccgataaaatcaacagtattttccttaatcaaagctaactcatcagcagttgactgccacaataccccatccttagtcagcaattctagcaattccacaggaaattcccctttgatggctgggtcgagaaacattttattgttccacagttcggcaattcgggctgcctcttgatctgcttcagcatctgaagctgcgtaagttggcgtcaagtttaacacggtaccaatccggccaccagcttgtggttgacccatttcgcgaaacttcgccatgaccttagcggaagcgagatttaaattgtatgccacttgtactgctttcttgccatccaccaattttggataatgaaattggaacaagtactccccatctactaccaccatcggctcattgtgggtcacccagtctttcacacggtcaccaaacaaagcaaaacattgttcagcaaatcccacaaacaaatcgacaactttcttcgattcccaaccgccatatttatggtaaagctccactggcaaatcaaaatgatggaggttaaaaatcggtcggatattttgagagaggaactcatcaatcacattattgtaaaaagcaacacccactggatccacttcattggtttccaaatccttgatgagacgggtccattgaatcgaggtgcgaagggaattcaatcccgtttgcttcatcaatgcgatatcttctcggtagctattgtaaaagttcgaagccatatctggccccactcggtcataaaaaacttcaggttcaatatcgtaccaatgatcaaacatattggcatgtttcttttgaaaacggccttctgattggggaccagatgtggctgcaccccaccagaaatcttttggaaatgtcaacatagcattctactccttttctctcaaaacgtcggctaaacactgccgcatatgatcgccaaattttggcaagtattcatggccatactctggataaaatagcatttctttgtcagctgcgctacttagctgattgtacacagcaaactgggttttcggtggacagactgtatctgcaaggccaattgcccaatgcaccttccctttgatccaaggagcaaagtattgcaaatcaatgtaatccaatgtttcaaagaaagcttcttctcgttggtgcaaggggtctttaaagcgaaaccaataagccaactcttcataggcggagttttctacatctaagcgataagcttcgcgataatcacttaggaacggataacaaacaaaagattccttgatttccggagcaacagccgcacaaatcaacgccaaagctcctccttgtgacgcaccataggtatacagttggctggtatccacttggggttctgctaccattagccgagtcaactggtaaatatcgagaaacacacttcgataaaataaatcatttggtccagactccactccccggattatatgccctttcagactggttttcgtggtcaatcccacatcttctgacaaaccaccttgtcctctaacatcgagtgccactacccaaaagccttcagcagccatagcgaccttgtctgaccaatccccagcatctgagtgatacccatgaaattgaagcaagaggggagactttttttgcagacgtttaggccgaatgagttgacaatggacggtggctccttgaacacctgtaaaagttaaatcaaatgcttctgctactgaagaattcaagggatgaggctctaaatgatagtctgtccccaaatcatctacctcttgaaaccctgcctgccaaaaagcttcaaaatcagcaggctctcgctgactcccttgatagttttgccaccttttttttgcatctattgcatacattaaacttgctcctttcgtaagtgatagtttgccactgctcctatcagattagcatcttgttgaaactgacaaatcttcacagtaattcgttggtcctctgaatgatgatgttgttgtaacaaacataattgggcttttaccggagccaatagatctttgcgcattgatatgccaccaccgatacagactacttcaggatcgatgaccaagcaaacattataaataccaatcgccaaggctcggaacaattgttgaacttcttgttgagccaattgatctccagtgtcagcaatatcaaatagttctcgacctgtaatacctgataccaaacctttctgttcgcaatagcgctttgcagcatgaacagggctggctaactcacttaacgtttgtccattttccgccaacatgtagccaaattcgcctccaaataagttatgccccttgactagtttccgctccaacaccacggctccaccgattcccgatccaatgatgaaagaaactgaacttttggcatctttggcagcaccataaaaggcttctgctaaccctgcacaattggcatcattttccacgaagacaggtttttccaataactcctctaattctgcaacaaaatgaattttatgaatataggggatcgcactgtagcccccgataatcccctgatcactgtccactgctccgggtacactgatcgacaccgcttcaatcggtgtctgactacaactggttaaattatgcaaagtggcttttaggtccatcttcatttgctcccaagtcacgggtgtcacaaaggaacctttttcggtcaaggcttctgctgcccacagagcatatttgatactcgtacccccaatatcaattgctaaaatactcaagaattccccctactttctcagtctacttacctacactaattttcattgtaagtagttatttatttttaggtatatacttttaaaatttgaaaatcaaaataaaaagcggaaagaggatttttccgcttacttattctctcgttaagacaaactccaccgaaaaactatcataacgatgaactgaaatggagtactcaaaagcgatgcctgtatcaaaataagcaatttgctctgccactgccaccggatctcccgaatccaattctagatactgttgttcgatttcagtcgcctttcggacactgacgcgtcgatgcccactttggattttcaaaccgagatcttcttcaatatattcataaatggacccttcaatattggcttttttcaaaccaggaatcaaatcgataggcatgtacattttttccataaccaacggcttgccatcaatgtgacgcacccgataaatatcatacacgaaagtatcttcctgcatatttaatttattttttaccaagttatccgcttctattaccttaaactccaaaactttacttttaacttcttttcctggattgagagcagtcgtcccacgaaactgattagccaccgcaattcgttctatttcatcggtcgccaaatccttgacaaaagtaccggatccacgacgtttgataatcaatccctctgacactaacatatctaaggcctttttcaccgtcatcttactagcgtcatattccacacaaagatctctttcgaagggaatttgttgatttgcttgatatacaccttccagtatcttcttacggatatcactggaaataaggatatattttttcatcgtcatgttacctccacttatggcttatcctaatatcttatcctatctgctaccgaatggaaatagccagccactgtccttttgaaattatttatctactcgtcgtaaatgatacagttgagacgcataatcccccggcaattgacgggaccaatagtcttttgctcgaccgacatagttgccacccataatcaagccaatgctagaaagatccttaccggaacgtaattgtggcagttgattgatttgataattagcttccaaatctaaaccggccaataataaacgacgataagccggattcggtttacccaacacttgataatccgccaccaaagcttcactcaaatcttttgaaactaccatccaactacactgggtattatcaaaaggactattgagacgataaaaacgcccctcgtggatcaattctcggtattctttaaaggtggcaatcgctgcttttacctgttgtagctctacatctgacatcctcgtaatatccaactccaaaccataagtaccaaacatcgctacctgattacgaaaagtcagtcctggcgaacgccctacttgatgattgggaatctgtgacaaatgactaccgatactagctaatgggtaaaccatcgaagccccgtattgaattttcaagcgttcgaccccatcagtatcatcactggcccaagtctggggcgcatagtagagtaacccaggatcaaaacggccaccgccaccagcgcaggattcaatcaacaaatcggggtattttgctaagattttttcatacaggtcataaacacctaaaatgtagcgatggaacaactctccttgattaccatcggcgaggtaattggaaaatggttctgaaatataacgattcatatcccatttcaggtatgtaattttgccacaagcaagaacgcaatcgatttgctggaaaattgtctccaccacttctgggttgctaaaatccaagacaaactgattccgtccatgagagatttgcttctcagaattaccaattacccactcagggtgcatctcatacaagggtgtatccgtagaaatcatttcgggttcaaaccacagcccaaattccaaacctaattgattgattttcgtcgcaaaggcagagatcccctctggtattttggctagctgcacctgccaattacctaaagagccgttatcactattccgagtaccaaaccagccgtcatccaacacaaacagatccacaccgattgctgctgctttttcagcgatttgtaataatttctcactgtcaaaatcaaaataagtggcttcccaattgttgattaaaacaggtcgttgcttatgagaccagcgaggtgatatcaagtgctcttggaaaaaatgatggaagctttgactcataccattaaaaccggcctcactatacaccagtactgcttccggtgtcaaaaatgtgctttttggagttaattgccaagcaaattcaaaaggattgatacccatttgaattcgcaaaatgtcataagtatccagctgcaaacgtgccacaaaattgccactataaattaagctaaagccatagatctttccttgttcttccgtcgcattggactcacaaacagccataaaaggattgtggacatgactgctggctccacgagtactggcgacttcttgcacaccataagcaatggaatttctactaatctgggtttctctcgcccaagctccatccaagtgtagccaatcatagtgctgatttggaagatccagattaaaactcagacagtccaataactcaaaggtcgtctcactaggattgatgatcttcatttgtctggtcactacagattcttcaccaaacaaggtatagtaaagctcgacttgcaaaggtgaataacgatcttgcaaggtgataattaaagtctcccccgcttcaccaaaactgccaggcaagccagaaagtgcctgttttcctaattcaatccgatagtgttgataggtaaagtgactaatacgatctccttttggatagcgtacccgtagcatgggatagcgaaaatcagtggtaccatagaggcccacttcttgtttgatatgttccaacgaagtagtgtagttttgcttgatttggttgttagcgggacgtatttctctttcaatcaaaaaatcatattgatcataaataggaatactacttccaaaatagagttgttccaagacgtctaactcttccattacccgaaaaatataactaatgttctgattttttaggtgaaactctcttctttcaggattgacactaatcatgatttattccttccatttcacgaaatttttgcgagccttttttcagtaaataggccactccgccaggagccaccaagaaaaacagcaagggactgaccagcaataataggatccaaaaggcataggtccccaagatgaagccatttagcaaactgggtcgtaatgtctgaagtaatagctgatacccaatagcaacaggagcttccttcatttcgtcatacgtcgctgttcccaagacccagtgtgcattatagagtaagaaaagaagcaaagataatcccccagtaactttaaaaaacaagcctagtgaagtgctaccgagccacgcaccagataaaaagatcgccaaggacaaaaatacgcccacagatagcactttttcgcacagtttcgtaggtggtagcttcttggttagtcgacagagcttttcttgtaaggcttctggatggtcgacacaaaaaactaactttttatggctactaacccagccataaataaagccaccagtgactaaccagccccaaaaatgcaaggaacactttactaggacatagagtaattccactgcaactactaatttactggacttctcggtcaccagtaaccctccttttccggtaagcttatttcacagaaccagcaacaccattgtaaatgtatttttgcaaagccaagaagacaaccaaaatcggtaaaataacaataattaccccggctaagatcactggccagttggttccataagggcctttgaatgcaaagagtgccgtggagatcacttttagtttacgatcgggcatatacaagaatggattatagaaatcattgtaaacacccacaccgctgatgattagcatagtgacaataggtgcctttaagttcggtaaaataatccgccaaaagataccaaaatagttggccccgtccaaataggccgattcgtctagagagactgggatttcatctaagtattgcaaaaaaacatagatggaaatcacatctgttcccaaatttagtaaaataactgaccaaatcgtgttgaacaagccaattccttcaatgatttggaacgtcgctacttgactagtaatgccaggaatcaacattgccatcataaacaaagctataatcggctttttcagtttaaaatcaaaacggctcataacataggcaaacatcgagcctaacaaaagcttacctaccatactaattgaaaaaataagcaacgtatttttaaaacctgtcaacatctgaccattgataaacgcagttttgtaattactaaagtccaatgactttggtagcgacaagacactggtagacaaaaattcattattggatttgaaagagccaataaaaactaccaggattggtagtacggcaaccactgccccgataatcaaaatcaaatattgaagtatacgtccgatagaaaattgtcttttcatcttctatgcctccttctcgctaataaatttccgttgaatcaacgtcaccactaagacaatcacgagtaaaataactgccatcgctgaagctaaaccaactttattatacttaaaggcagtatcgatggtttggattacaaaggtcatggtgccgttggatcctccagtcataatatatggaatatcaaagacactcaaggagccgcttatgcccaaaatcagatttaggaagatgattttgcgaatacttggtacgatgatataacgaaactcatcccaacgattagccccatctatttcggctgcttcataaacttctggattgaccgactggattgctcctaaaaaaatcaaaaagttaaagccggtataacgccacaaggaagtaaaggccaaagaaatattattgatggagcgatctcctaaccatagccgaatttgactctccaaacctagcgccgatagcactgtatccaaagttccatcacctttaaagaagtacaagaaaataaatccaattgctaccccatttagtaaataagggaaaaacaaaatccccttccaaaaattagcaaatttgaccttaaaggacaaaatcgttgcaaacaataaagcgacacccaattgcaaaaaagttgcaaagaagtaatacaagctggttttaaaaacggtaaagtattttggattggttaagactgtcttgtagttatctagtccgacaaatttactgtctggggaataaccattccactctgtcaaactgtactggaacatcttcactaaaggataataagataacattaataataaaaataccggaataatggtaaaagtaaagatcaagattcttttttcagttttttggctaaaacgggattttttcaccgtcttattcatggtaaactctccctgtttattcatgttggctcctccttattctaaaacccctcatatcgaccacggtccgcaatcgctatgtactcctgcaaaagaagttactaccaagataagttttctttacgacactgtgcttttgcctggcacaagttgccagacaaaagttagtgcctacaatcaaaactttatttgctatcaatcaaaagtcttttcctaactgctagggtgacttctaaaaaaattttactctcccacttctgctatcgcatctgaccagcgtgtattgaagtctttcataatagcttcgaagctttcgttagagttaccaactgctgcatcgatgattcgttgcttttcagcatctgtcgtacccaaacctagttcagattggtcattgattgaactaaacaatgattcttttccggctggtgctggattttcttcaattaactcaaccccagcatcttgtgcagccttcaatgattctggataatctgctccaatttttgctgacaagcccccgttttcttccgcgtagtctgattcattgactaaccagtcgatcaacttgcgcgccgcttctttgtgcttactatgaacgttgatcccatagttataatctgctccaattggcaaatattgtttaccatcctcggcagtcattggaaatggttggaagataatgtcctcagcagtatcagcattgatgtctttgatttgtggtaccgcccaacttcccaaaaccatgatcccaatcttaccattagccatatctacttttgattgttcccaatcagatgtagttgggtcagcctcaatcaacccttgattgctaacatcgtatagggttttataaatcgtattcatcactttacccgctgcaaatggctctttgtctgaagtcatcttattggtaaagtctttatcaccagaagcaccactgcgaacaaagtcccagtttgataatgtccaaccagccgcatagttagtatatagcggcatcacatcagtatttttttctttgattgtttttaatgctgctacaaaatcttctggtgtttgtggaaattcgtcaataccagcatctttgaagaccttttgattgaccaccatcccagtggcgttcatctgtgacggtaagccataactcgtgccatcataggaccgatcatttaaacccatatactctttgctgagctcttcctttttaccaagtggttcaaaaaagttcccataatcttctggcttgatatctcctggaatcatcaaaacatccccatattcttcactattcatccgggttttaatttggccagcatagtctgtaatcgtttgaatttctactttgatatccgggtacttctcattgaattttgtcatgtattcatcccattttccattggtttcccagtcggttttgtggttgatgaaggtaatggtctcagttttcccaccatccttgtcattagctgaatctttgttgtttccacatgcccctagaactaaacctgctactcccaagacgatcattgaacctagcatttttttcttcatgttacttcctcctataaattaataaagtgctgttaccaaaaactgttcatggcctgttacgtcagaaatggaaaacgattacataaatataatactacattcccatttcaaagtatatacttttatatatattgttttgtacttttgtaaaattctcgaatgatcgccgcagccggtttaccgtaaaccccgtaatcgtcgtctttgagcgccacctctcgcgaatataaccgcgccttccagtcccaaataccaaagccttgaatccagtttctcttgtcacaagcagtaaacatcttttcaaaccatcgtgattgcgctatcatgctaacttcccctgaaaaactccaatcattgggtagatattgacttccttcacgacttggacaacccacttcacaaaagaagaaaggtttttggtagtgatttaccacttgttcaatccgatccaattcttgttcccatttgtcaatcggataatagcctgatgaagagatgacatctacagcatcccaccaagttagattattttcttgatacttgtcacaattataagttagtagaccattgtaatgctgtcgaatctgggaaatagtttcccgccactgagcttcccgtcgatcactattaaccaattcacagccgattaccaacatgacacaccctgtctcttcagcgagttttgcatagtgattcaggtattcacgataggaatcaaaccattggctccaagtcggctcgcagggaacatcgtaatcaaaaaaattgatgtgcgctcgccacgtaccatctgccacattgaccatgggtttcaagattactttcaacccgattccctgagcgtaagcgatcatccctttcacttctgcatctattaaaacgttgtcactttgccaatcgattttggtagactgaggatgagcttgtgtgacagtaattggtaatatcacatgacttgcagctaactcttctttcatcatgcgtaatgattctcgactcattggatcttgccagtctccccgttggctcataaacccaaaagttatcccattgatagtttccatcttttcacttctccacgttttattttgtaatcgatttcaattctatattataaaggacgaagaagaaaaaaaacaacaaaaatatatacttttgattataatgatttatacaatatgatatagtaaatataataaaattggaggtcttttttggataagaaaaaattgtacacgtagctcactcaaaaaatcatccccttctggcaaggtaagatggatctaattcatgatggtttttacggtcgtcgggataagatcccactactaataagagctgcttgatgaacgcccggtatttatggagttttagtcattgctgccgcattttacaagacaaatccttaactgagtcttttttagctagcctaaagactgctgcgaatcctgcctatgaatttttccggtaagtctgttgggaccaggaaaacccaggggatcttctgggagctaaccgcaactgaaatactctctgatcccaataaaaccacttatgctaatagttttgccctctatgttcttagcgagtattacttagactttcatgatctgtctgcattaaaaatggcaaccacgctctttagttttctcgaaaagaagtcttatgaccctcttacaaatggttatcaggaggatttttcccacaactggtagcccgttccctcccaatcaatcggacccagcgatttgccagatctagactttaccactaatacccatttgcactttttagaggcatatataaatttctacatgacgacgccaacattcgatgtaaaaactaccttgcaaagattactcattgtctttacagataagattgcgaccccagcaaactgcctccaatttttcaatgctgattggtgtcctctaagccaagaaatcagttttagccatgacattgaaaccatttgggtattgcaacggactttgactgttactagtatcaaagatgtgcaagtcagtcaatttattgaaaatcttggtactcaagtagctaccaaaggcttcgataacaacaaaatcatttgtgatcattcaaatacccttcaaacctcgactcgaaaaacttggtggacgctagcagaagcaatcatcggcttttacaacctgtatcaattaactaatagtaaggtctattatgaattggctactcaccacttcgaaatggtagaatgaaactttgtggatactcgatctaacagtgaatggtatgcctacctcatcaatgatggacaccagattctacagaagatatcgccaacgcttggaaaggccccttaccatacctgtcgtatgtacacagaaacaattgcacgcctatctaggtaagaaaaacaggacgacctgacttctagagaatcattcgaattgtagtgacatcgcaaaaagccaactaaagaacagttggctttttgatagtttattttagtaatttctgcttagatgcaaatatatgcgcaaatggttctttagctcttggttatccttaatactacaacctaattgattctctccagcaactccaccctatttttcataatttttgaattaaaataaaggtaatcccttttaattttctatctttatttcaatatcagaatttattattttaaatttttacatacctgtttatgaaaaactaaataatctgtcaaaaaaatatgattgttcatttctaaatatgttttccaattttaaaatcttttttagcatttttgtttccttttcatatggtttttcgttgttaatagtgactaggatgatattcctattttgaccattgacaattaaatataatttttgaataacgttccctgctattcgagctaagaattcaagtacgccatgacctatttagcgataactacttagagatttctttttgttttgggaagacaaaatgccatgacaatagcagtagataatgatacttccgtaaggctcgccgtaaactggggagaggtgaaattcctatgtgcttacccaaggcaattcaaaaattttagttcatttataaggggatgattttattaaatcaatagtctatctaaacaaaaaacaaacctgtgagtttttaggaattgataacaatactttagataaatggattcgtatatataattttcccgtaataaaaatagacggtataattcgctttgatgtagaagatatcaaaggctttatggatacgttcaaaaagatttgaattttacttttgactgcatatactaaaagtagcgaaatatactgccttacttttttattaaggagtgaggaagttgcctacgaagctttcaaatggaaaatataaaactaatttgagatatccaaaaaaatttaaagaaattacaggtatcagttcagaaaaattccaaaaaacatttccaactaggcaattggctattaaagccgaaaatgaaatgaaaaagaaaatcgcaaaagtcttaagagaggagaatgcaaattcattagagctcaaaggtcaaataaaattcaaggagttttataaatctaaatggcttcctagatatgagttagggcaaactactagatcccataaagctccaagcgatataaccatcattaatacaaagaatttatttcgattgcatattctgcctatatttggtgagtatgccatgagctatcttaatgcaaataccgaaataatatcagatgaactcacaaaaaagtcgaaggaatatgcaaacataaaaatcattaaatgctatgttcgttccatgtttgatattgcagaggttctaaattatattgaatttaatcgtacaacaaaaataattcaaagtattactgcacctaagaaagttgctctggaagaaaaaagaatacgagaaggaaaacaagctttatcttcgaaagaactcactgattggttagacactgtaagagatgatttcaatgatcaattactttcctttcacgattacactctttttatgcttactttatatcttggggatagaaagagtgagacctatgctttgcaatggaaatacattgattttgaaaaccaaacagtccgtcttaaatatgccttggataaacacacaaaaaagaaatttacaaaaggtcgaaaagatactattatccaagttccggaaattgtaatgacactattgcaagaatggaaatcagtgcaagctgaacaactattgaagttgaaaattaaacagacacctgaccaatatctttttagttactccaaaccttctggtgaagtaaattgtccagtccatactgattacttaaattatcgaattaattctataaaaaaaagacatcccatttggttcatttaactcctcataaacttcgacatacttacgcaactttagctagacaaggtggggctgatatgaatcaaatttctaacgctttgacacattcaggtatttcaactacaaaaatttatgtgaatacacctgatttagttgataaagctgtgttcgaagcgtttcagcgaggattacaaaaatctaattaatgtgttctagaatgtgttctaaatataaaaaaaagacactttccaaataattggaaagcgtcttgaacgttgatatataaaggatattaacgttttgaaaactgtgaagctttacgagctttcttaagacctggtttcttacgttcgaccatacgtgcgtcccgagtaagtaaaccagcgcgtttaagagctagacggaaatcaggatctacttgtagcaatgcacgtgcgataccgtgacggattgcacctgattgtccagcatatccaccaccatttacgtttacaaaaacatcatatgatcctttagtttctgtaacgccgaatggttggttgattacttcacgcaggtcagcgtgtggaatgtattcttcaacatcttttttgttaacagtaattttaccagtacctggtactaaacgtacgcgagctactgcatttttacgacggcctgtgccgatatattgagcttgtgccaatgaaattccctcctattagattaagtttgtgatgtccaatacttctggttgttgtgcagcatgtgggtgttcagcgccagcataaacatgaagtttcattccttgtttacgtcctaaagtgtttttaggaagcatgcctttaacagaagtttcgatcaaacgacgagaatttttagcacgtagttctcccgcagagactgatttcaatccgcctgggaagtttgagtgacggtaataaattttatcgcttgctttgttacctgttaatttgattttttctgcattaatgacgattacgaaatcacctgtatccacatgaggtgtgaatgttggtttatttttaccacgtaagatagatgccacaactgctgaaagacgtcccataggaacatccgttgcatctactacgtaccatttacgttctacttcgcctggtttggccatatatgttgtacgcacgatttttttcctccaattcaatttcacgaatgtttgacatacacttgagtttccggggctctcgtggggcaaacaataccatataacataataccgtcttaagcgccacatgtcaacgtgtttcgcagtttttttgaaatttcccttcaattcttttccgaaaactttcagttgttattctgaccaaacagcctgcacttttatacacattttgcgcataatttgtatacttcctgcaataagtatctctggtttttattattatatcaatctgtatctatatccttgctaaacacaagaagaattcattgtataaatatttactttttctcttgatttcttatttttattctgttacgatagcttcatcttacttgaacttaaggatgggagttaatcattatgaaagaaaaagtaattttagcgtattctggtggacttgatacgtctgtttccattaaatggctgacagatcaaggatatgatgtggtggcgtgctgtctggatattggcgaaggccgtgatacacaatcaatcaaagacaaagcactcgatgtgggtgccatcgaatcctatgcgattgatgcccgagaagagtttgcccaagactttgcattgattgccttacaagggaataccttctatgagaactcctatccgctggtctctgccctttctcgtccgctgattgccaagaaactagtagaattagccatcgctacaggggcgactaccgttgctcatggctgtactggtaaaggaaatgaccaagtccggttcgaggtcgcgattgccgcattagcccctcacttgaaagtcattgctccggttcgggaatggaaatggtcccgggaagaagagattgcctatgccgctgaaaaaggggtgccgattcctgccgatttggataacccttattcgattgatcaaaatctttggggccgggcttgcgaatgcggggtcttagaagatccatgggcgactccccctagaggcgcttatgccattacgcaagaattggaagatactcctgatgtaccgacgatcgttgagattacttttgatcaagggattcctaccgcattggatggcgaaacactgaatctggccgaattgattatgaaaatgaatcgtctagccggcgaacatggtattggtcggatcgaccacatcgaaaaccgtttagtgggaatcaaatctcgtgaagtctacgaatgtccgggagcgatggctctaatgacagctcataaagaattagaggatttggtttttgttcgcgagttggcccatttcaaaccaatcatcgagcagcaactggcccaagtaatttatgatggcctctggttcaatcccttaaccgatgccttgatcgcttttctaaaaaacacacaagtctatgtcaatgggatcgtacgtttgaaattgttcaaaggcaatgtcatctgtgaaggacgtaagtcagagaacagtctttacgatgaaaacttggcgacttatacgtctgccgataccttcgatcaacacgcggcgatcggattcatcaaattatggggactgcctagcaaggtccacgcagagattcaggcacaacagcaattaacagaaacactgatttagtcaataaggtgactttttccttttgagggtgaagtcaagtttctttcgaggtgagcaaaatggcaaaattatggggcggtcgtttcgacggcaaaaatgaagcatggatcgatgcctttggagcgtcgattcctttcgatcaattattggcaaaacaggacatccaaggcagtttggctcacgtcaaaatgctgatccacacggggatcattgatgaagcagatggcaacaaaatcattcaaggcttgttagcgatccaagaaaaattagcggatggtgaactgaccttttcgattgagaacgaagatattcatttgaatatcgagacctttttacatgaagaaattggacccgtcgctggcaaattgcatacggcccggagtcggaatgatcaagttgcgacggatatgcacttgtacttgaaggatgtggtaaaggaagtcatcgacttgattgcggcgttccgtcacgtactagtggagcaagctgaaagcaatatctacacgatcatgcccggctatactcacctgcagcatgcacagccgatttcttttgcccatcacttgttagcctattacagcatgttgacccgcgatcaagaacggtttacagaaagtctcactcggatcgatatcatgcctttaggcagtgctgcattggctggcaccacattccctatcgaccgtgcctatagtgcggaagcattaggttttggctcgatttacagcaatagtctggatgccgttagtgaccgtgattttattctggaatttttgagtaatgccgcgattttgatgatgcatctttctcgtttttgtgaagagttgattctttggtgcagtcatgagtttcaattcgtggaattgacggatactttctctacaggtagttcaatcatgccgcaaaaaaagaatcctgacatggcggaattgatccgcggcaaaacaggacgtgtctatggcaacctttttagtttattgacggtcatgaaaggtctgcctttggcttataacaaagatttccaagaagacaaagaaggcatgttcgataccaccgaaaccattgtgaaaagcttgcagatcatgaccggaatgatccaaacgatgcaagtcaaccatgagcgaatgaaacgttcgacagaaaaagacttttccaatgccactgaactggcggattatttagcagataaaggaattcctttccgacaagcccatgaaatcgttggtaaattggtgagtgagtgcctcagtaaaggcatttatctacaggatatcccactagaagagtatcaagcagtccagccagtgatcgaagctgacatttacgataaactggactcttatacggcagtcaagaaccggcattcttacggcggtaccggatttgaccaagtcaaacaacagatcgaagccgccaagcaatccttggcattggcataaaaaaaaggctgcagaagaactagctaaccaaaataatctcaacgatgataaatgaatggtgtgatccattacctatttgcgaatcggttctgctaactgcagagacaatctcatcgtttgattattctgtttgctgaagggcttctgtcaaagccttttttatgtctatcagaaatacgaaagcctgtgctttataaattctgatagtgaaaaacttgttatcgttttcctatacaagtacctgttggattaagaacaactaaccttttgattgttacctatcttaatcaaaaatcatctaatcaaaattcgtatcctttagcaattttcctgctgtattagcgactcgccaatcgctccccctggatgccattgcacatacatttctggggttaactttcgagcttcttgcaagagtagcgatagcttttgtaaaacaatgatttgtaccaaaaccgataagcgaggcggcttgttcaatagatccccttctttatgaactgccgcgcatagggaaacatccgataaatgactgagcgtagagtcacttcttttggagacgccgataatttttgcaccattattcttaagtgtctcaactgtatagagtagttctttggtttccccactgttagaaatagcgatcactacatcaccagcttttacttgaccacttgatccatggaccgcttccgttccatctaaaaaatagcttggcgtaccggtggatgaaagcaatgaagcaatatatcccgcaacataagagggttttccgatccccgttacatggacgcgccctccgtcagcttctgtttggagaatcgtctctttcgcagcttctaaagatccttcatcgattttgtccatcgctaaagccaattcatctagtacacactgatcataactcaatcccattctttcacctgatttctatttattgaaaaccgaataatcttttgtatccataggtgtcgtttggaagaaaaacttgacgcctttttcttggatttctcgtatagctgtcatttcttcctgagtgaaatattcatcgattttcttcaagagaattcgacttgctggataaggaagttgcacttcttttgaagaaaaccccttattcacagcctctcttagcgcacaaatatttttgaaaataatcattacactgcatttttcttccgtgtcctgtgctaaaaattccaataattgatcgactgagaagatactaactttacttttattagaaaagctaagctgcaaaactttctccaggaaaggatcatctttatgagtaggatctacaatcgcgatataactagcattaatgaagttgttccaattcaatgccactgttgcatgcaacaaccgtttgtccactctgactaatttcactttcttactcatagatctcacctgcctgctcacgcttgtcattatcacttaaatagttagctagtaaataaaactggatcttaccttgaaaactcccacgaatatcgatatgaaatagttcctcaaatcgtttgattttatacactagagtatttttgtgtaaaaacaaactttctgctgtctgtgtcagattataatcattagtgtataaatgtcttgcaatactgatcagttcagcagtatcaattttgttgattcctccattaaaataatcaaacagattcgttacttcttggtgaggaactcgatttgctaggtaattaaggacgtagtcccaaaaatggtaaatcttttgtccttccattgcaaaatttctcttcagccaatatgtatgttgatagcttgactggaatagccgcaacttattttgcacactgcctacataaaaatagcagtcacttaatccccattcttgcagatcgcgaataaaactgttgagatagtctttgaccgtcagctccatcaaattttttgggatgactttaaacataattatctcattatctgccatcaatgagtaaatagtctcatcttcattgattttgtactttaagtttgtcacttcttgcacatcaaaagctgttcctttgactatacggattgctactcttggctttgttccatcaatgtgcagttcttgaacaagacgcagaacttcgtcaatgctaaaattcctcttggcaatcagtgctttgatcaattgttcttccaaacttaaactttgtctagcagcttcttgattcatttcataaataattcttgttttaagcgactctgacagcaaatttgccacaatacttaaactatcatcctgtccatttacccataaataaccatagtctttctcttcaacagcaattttatagaagtggtcgtctttaccttgttgacttaggtcgatcaaagtaccattttttcttttatcgctactggaaataacttttccataattatctataaggccaatcgtatatttggggttttcttgtacaacaaaaataaattctttaaaaatttgctccaaattcattatattcacctcaagctaaaaaatacgtatccagcataaacataacatttcttatcaacaaatttttaaagaatcctcacacttaatcaattaaattgtaatactttagcatagacaaaattttcctgtcatcggatgctgttgtttctttcactggtcgtcgagcgggacctacttcggcaatcgcagccaattcaattgctctttttaatattgaaggtactgttcctaattttaatgcaccacgtaattcttcaatgtcattttgtaatttctccgctgattcccagttattccctctgattgcctgatccaagctcacgatcgtttccgtgattaaattgcttgtaccagcaattgccccagatgcgcctagtttatagccggctaaaattttcgagtcagatccaaccaacacgttaacctttgtgccctcagttacttctaggtagtcctttaagttgttcaagtctccgctgctatccttgattcctaaaacattgggtaattttgtcaactctctcaaaacttctttcgaaatattacatccagtatttttaggaatattgtatagaatgattgggatctgtacactgttcgctaccttttgataatgctgcaaaatttcttcatcagatggggttataaaataaggcgttatgacagataaagcatcggctcccagtgactccgctttttgtgatagttcgatcgtttcttttgtagaacatgcgccagttccaatataaacaggtactcgttttgccacatgatcaatgaccgcttttgaaaaagccattttttcttctgaatttaacacatgaaactccccgttacttcctaaggggaatattccagacacacctttttcaatcagatgatccaccaagttttccattgcctcataattgatggtttcagctgtatctctatgaaaaggggtgacaattggggtaattattccttcaaacatcttttagtctccttcactcaataactgttcatttgttaaaacaacactttcttttgcaaccgtaaaacaactctcaacaaacgcatccagatcaatcgtctcggcagttgtgcctttcatatataaatcaataaacattggcaagtttacaccagtcaccactttatgctggtattttttggtcaacgccgtcagtacattggagggtgttcctccaaatagatcaactaaagcaatcgttggcccactaatggtttcaaataattcattggcttctgccaaaaagttttcaaaagatttatcgggaagcagtgataggctatagacattcaccgtctttcctacgatcatttcagccgaacgaatcaattctgcgccaaatgatccgtgagttgccacgactagattcaatttagtcattttctctctccttcatagtttagcaatttactcaaaacaatatccgttgaaatttcgcaagttctggcttcggattcaatcgttctggcacctgtatggggtgttagatagaagttttccctcgcaagcaatgggtcctcagatttcggcggctctgaactaaatacatcgaaacaagcactgcgaatgactttcccagctaaagctttagataacgcctcctcgtcaacaatgcctcctcgtgcagtattgattaaacaagcattatctttcattctgtttaattcagcagttgagattagatttttagttttttccgttaaaggtaaatgtagggagacgtaatccgattcctgcagcaatgtttccaatgctagttgctctgcatcatactgtttcagctcttcaaccggcacatcataaacgtcataaatccgaacatgcatcccaacaccctgtgcttgtcgtgctaactgtttcccaatcgcaccaaatccaatgataccaattgtttttccatataattctctgccggtaggtttctgccattctccttctttgacttcacgaaccgtttcataaatattttttgattcactgtaaattaacgccataacatgttctgcgacagcgatagaattagagccaatggttcgtccaacataaattcctttcgattccgcgtaagcaacatcgatgttgtcggttccgacaccgaatttgcaaatcacttttaactgtgggcactgatcgataaatgcctgatcaataagatcgacaccaacaataatcccatccgcatcctttgataattcaagaaatttttcaggtgaataagcttgaccagtgttgttataactcacttgaaatccgtgagaacgcagtttgtccaattccttttccccataatttgcaaaaccgcgaggtgtaatgactatcttcatttgcgttttctccaatcttccttacaaaataccaaaaaaggttagcgcgattgcaaagagcatcgtcgcaataatgatctgcaggtatttgggtccttttttcatgatataaaaatacattgccataactaaacagaaaggcagaaagctcggtagaataccgtcaataatttcttgaaccgaggttgtccctgtttcattgctaaattcaagaatcgtcgaaaaattgacatacgccgcagacagacacccaatcataaagagaccaacaatactcgcaatgtcgatgacttttttgattgatccagaattcaaaatatttaatacagaactctttcctagagtgtatcctttattaatcaaaaaccatgaccagccaaaactccatgcgatgtagataactcctgggataaatgctgctagaattgatccgttcaaagccataggtacaaaaatcgcgagtggtattgtagctacgataccttggtcgacgctatcaccaatccctgctaaaggtcccattaaaccaatttttaacgactcgatgacttcaggtgtaatctcttcatttccattagcccgctgttcttctaaagaaatgacgattccatgaataatacttccccaatcacaattcgtattaaacatttgtacatgtcgtttcatcgctgcttgtaattcttctgggtcatctttataaattttttgaagtgtcttatttaatgaatagctgaaagctaaagcctgcattcggtcaaagctaaccggaacctcgacagctaatgtccatttccaccatgcttttaacaaatccaatttcgtaacctttttttcagtagcaactgtcatttctgcactcatgcaaattccccctcatcagaattttgtttgaataatgaactaatcattgcaatacatacagcaaagactgcccctgtcaacattgagaatcctagaactgcatacataaagaaccctaaaacgaaaaatggtaaatattgttttttacccatcacgaccagagtcaatgcaaatcctaatgccggcaacattcctcctgcattggctaatccattcattaaccattccggaataacatttaagaatgcctgaatgacatttgtgccaaataaggttgcgataaataccggtgtaaagtatagaacaccgttcgttaaccaaggaatcacgaaagagaataaagacaattgatcatatttattcgcttcaaccaacgcatcagcacgcgtattataaaatgagttgatcgtacgacgaacattgttgatcaatacaccaagtacaccgaatggtactgctaaagcaactgctgcgctagcctctagaccactagctaaggctgctggaatagcgatacatgctgctaaagcttgatcgcttggaatattcccaccagcctcgatcccacccatgtacatcaactgaatcgttgctccatataatagtccagcttgaacatccccatatacgagaccaataaaaacacctaaaactaccggttttctaaaggcaaaagaaacgaagtaactcgcacgacccattgctaaccaataaattaaaccgactaaagctgattgaataaccatgttttcactccttactctttatgctaatttttttactgcattttgaagtgtttctgaagggtaatctggtgtcgtttgaaaatagacattgattcctttagactcaatcgctaataattgatcggcatctttgcgatcaagcgtaatggcattgttgactgcctttctaccagggcccccacctaagccgccaatttgaatttcgggtaatgccaaaccggcgttgatcgcattggtcaattcttgaacactttttagtaaaaccaaaatacgatttctctcaaattcgccattttcttgcgctgcgacagcttcttcgacagaaagaatccgaatccgaacccctttaggtgcagccattttaaaaacatcttgcataaactcatctttgcttagtgctgtatctactgtcacgatttcgttgatatcacattgctttagccagcgagtgatcacctgtccatgaattagtctaaaatctactcttgtcagtgcaatactcatatattttccccttttctttcctattacttagtaagcggtttctaattgttgcttgttaaatttcctttacccactcttttttccaaaactacttacggtatttttggacgacagtatgaatcgcttccgcattggtcctaatttctgccaccgttccttttgtcaataggctcccgataccacagacatcaacgccacgttgtagccatgtttctatgttctcaagattgatcccgccactagctaaaattggcatatctggaatcggtgttttaaagacagttactagtttagaaccataaaaatccgagattggaaaggctttgatgaaagcagctcccgcactcaatgaatcgacagcctctgtaaaggaagtacagcccggtgcataaggtatttggtatcggttacatatctttgcaacctcttttgaataattcggtgcaataataaactgtgcaccatgcagtattgcatgtctggctgtttcgctatcaaaaactgtccctgcacccacacataattgatccccatatttttctgtcaatttttttatgatgtcgccagcactattcaatgtataactcatttccatcactggtacaccaccggcgatacacccatcagcaatttcacacgctcgttcaaaggattccgtgcggacaattgctaatgcaccggtttgatagattctctgtgtaacactcatttttttcatcatttctcctcacctcacctataatttaaatcgaatgggaaaatattcatatgtttgaacaaacgaaaaaaatctccttttttggatgacagacacaatccacttgatacgaaagcgttttctatcgcttttaaaaaggtattttttagcaaaacaaccctgtagtagtggactttggaataaaaaattggaaatcgaaagaagccctgatcattaataaaggacagatttagcgtaaaatcgttcatttaaccgaactatctgaaggacaggttctttagcaaaagaaaaaaaccggaacagaagtcacacttctgttccggtttccactctatttatacagtttgatcagaaatcttttttatgctcactgaatcaatgacgcacacgtgattttgctggatcgatttgaggcgcttcacctaggtgcgcttggatcatccagatacgtttttcagtatctgttttgaagccgataaagatatcttgtgttggatcatcgccttcttcaccactgacttcaatccctttttggtataagtcagctagataacgataaccttcaacaagtgtagctaaacgttctgggatcgtacggtcccagttgccgatttcatcagggatttgtgtattgtctgccatttcccgtaatgttgagtatggtgagccatctaatgtgatcaagcgttcagagatcacatctaattgatcattcaagtcatccataaaatcatccatcattggatgtaaagttaaaaagccaggtcctcgcatgtaccagtgtgtttggtgaacgaccattgccatttgacttaagtcagcaacgagttgattcaacacttcttttgtttgttcaaatttcattacgattcctcctttaaattctctatttcaagcatagtatgaatctaaaaaaaagtacaccaaaacctactacttgagaaaatttctcagcttttcacgtatttctttatgaggcaaaggaggaggagacagtgtatctgatgtggggatatattttaggtgcagcggtatatgcgtttattcaaaccatttactggcaggatgatccaagcgaatattttgatgattttcatagaaaacctcctattttctattccgtggcccaacagccattttttccttttatcaagcatgctcaagttttattggattgcactgctgctagtttattggcaaaaagcgtttatgcttggctgatctggcttgctttcctacaaccatccgtaggggagtgttggctggcgttggtctggttgaacagtgcttacctcctcactttgacagatctctacgattatagtgtcaagggagagattctctatccttctttgtttttattggcttttaccaatctcatgaacgcacagccttttcattggcagaacttcctgctgcttctgccattattctttttcgtttggcaagaacagctgggagatggtgacttattcttgattggtggttgggcgccttggctgtctacttaccaactcctgtggctgttgattatcgctagctgctgcggactcttgtttttttcattgcatatgctgtttgtcagaaaccaattacgaatgctgccctttgttccttgtttgagtttagcattagtcatcgtgcgtttcctttaacaaaaaagcccgctgtttcattagcgaaacagcgggcttttgtttagttttggttgttcaatgcatcttctgcagccatttgcgcttcaatgtcggaaatactatagacattttcactcgcaacagtgacttcttttggttccatttcacggtagcgagccataccagtacctgcaggaataatcttaccgatgataacattttccttcaatcctagtaatggatctttcttcccgcggatcgcagcatctgtcaacacgcgcgttgtttcttggaaggatgcagcagataagaagctgtttgtttccaaggatgcttttgtgataccaagtaagactgggcggctggtagcaggaaccccgccggcaactaatgtgttgtagttgcggtctttaaagtcagcgatatccatcaatgttcctggcaagatgtctgaatcacctggatccatgacacgaactttacgcaacatttgacgaaccattacttcgatatgtttgtcgccgatttctaccccttgcatacggtaaacgcgttgtacttcacgcaatagatagttttcaacagacaagacgtcacgtacttgcagcaattgttttggatcgattgatccttctgtcaatggtgcaccacgatggataaagtctccttcgaccactttcatacgtgcggtaaatggtacagtataggtccgagtatcagtttcccctttgatcgtcacttctttcgtacgagtagacgcatcttcagagatatcgattacttcaccggtaacttcagtgatgaccgcttgacctttcggattacgggcttcaaagatttcttggacacgaggcagaccttgagtgatatcatcaccggctaccccaccggtatggaatgtacgcatggtcaactgagtacctggttcaccgattgattgggcagcgatcgtaccaactgcttcaccaacttcaacttctgaaccagttgccaagttacgaccataacaatgtttacatacaccatgttttgtattacatgtaaagacggaacggatcgaaacagtttcgattcctgcgtcaacgatttctttggcaaggtcttcagtgatcaattgatctggtccgacaatgactgcaccagtctctggatggatcgctgatttacgtgtgtaacgtccaatcaagcgttcttccaatgattcgatgatttcgttaccttcacgaatggcttgaatatctaagccacggtcggttccgcaatcttcttcacgaatgatgacatcttgcgccacgtcaaccaaacgacgagtcaagtaaccagaatcggctgtcttcaaggcggtatcggtcattcctttacgagccccgtgagtagagataaacatttctaagacagaaagtccttcacggaagtttgaaatgatcggtaattccatgatttgtccattcggcgcagccatcaatccacgcatcccagcaagctgagtaaagttggagatgttaccacgggctccagaatcagacatcatgaagattgggtttttcgcttccaatgattccatcagtttcaattggatctcatctttcgcggcattccagacaccgattacgcgttcataacgttcatcatcagtgatcaaaccacgacggaattgtttcgtgatcgtttcaacttgtttgtgggcattttcgatgatgtcatgtttttcatgcaagttcatgatatctgcaatacctacagtgataccggccattgtagaatggctataccctaagtctttcatgcggtcaagcatccgtgatgtttcagtgatgcggaaacgtttgaagacttcagaaataatatttcctaagtttttcttcttgaatggtccgactagttcttgttctttgatgaaagcaggaatatctgttccagcttcgacaaagtacttatctggtgtttggactgtcaagttgaaatctgttggttcattcaagtaagggaattctgttggcatgatcgagttgaagatcactttcccaacagtcgttaccatcaagcgttctttttgttctgcagtaaatggtttgtcccctaatgtgtttggattgatcgcaatacgggtgtgtaaatgcacgtaaccattgcgccaagctgttactgcttcgtccatgtcgcggaagatcatgccttccccttcgcggccttcttcttccatcgtcaagtagtagttccctaggaccatatcttgagatggtgttacaactggcttaccgtctttcggattcaagatgttttgtgctgctaacatcaacatccgtgcttcggcttgcgcttcttcattcaatggcacgtggacagccatttggtctccatcgaaatcggcgttgtaggcttcacagactagtgggtgcaaacgaatcgcacggccttcaaccaatacaggttcaaatgcttgaattccaagtctgtgcaacgtaggtgcccggttcaaaagaacagggtgttctttgatgacgtcttctaggacatcccaaacttcatcttcttggcgttcgattttacgtttcgcatttttgatgtttgacgcgatttcacgagaaaccaattcacgcatcacaaatggtttgaacaattcgatcgccatttcttttggcaatccacattgatacatttttaggaatggaccaacgacgataacggaacgaccagaatagtcaacacgtttacctagcaagttttgacggaaacgaccttgtttccctttcaacatatgagaaagagatttcaatggacggttacctggtcctgcaactggacgaccgcgacgaccattatcgatcaaggcatccactgcttcttggagcatccgtttttcattttgaacaataatattcggtgcatttaagtctaatagacgtttcaagcggttgttccggttgattacacggcgataaagatcgttcaagtcacttgttgcgaaacggccaccttctaattggaccattgggcgcaaatcaggcgggataactggaataacatccatgaccatccagcttggtttgtttcctgaagcacggaaagcttctaagatatccaaacgacggatcgcacgtgtccgtttttgtccggtcgcatttttcaattcttcttttagttcggccacttcgccgtctagatccacaccatccaacaattgtttgatggcttcagcacccatcgctgctgaaaattcttgaccgtattggtcacgtttttcacggtattcccgttcagtcaataattgtttcttctcaagactagtgtttcctggctcgatcacgacataagaagcaaaataaatgatttcttccaaggcacgtgggctcatgtctaacactagacccatccgtgaaggaatgcctttgaagtaccaaatatgtgatacaggtgccgctaattcaatgtgacccatccgttcacgacgaacttttgagcgagtgacttcaacaccgcaacggtcacaaacgattcctttataacgaattcgtttgtattttccgcaggcacattcccagtctttggttgggccgaaaatacgctcgtcaaacaacccttcgcgttcaggtttcaacgtacgatagttaatggtttcaggtttttttacttcaccgtaagaccagcttctgattttttcaggagaagccaaaccgatttgcatactttcgaatttatttacatcgatcaaaaaaggttccctccatttcatttcatggacatatccgatagaacacgaggttgagacctccgtctgattttgacgggtgtcccctcgtttctattattgcaagcgatcttctgctgtctcgatttgttggttcaaatcatcggcggcatttttagcttctgtttgtgcttgttgctcaatttcacgagcattttgttgttcggcaaattttgttaaggcgtccacggtgatcaagtcatcatcgtcatcatccatatcacgcaattcaatctctgcatcatcaatgtctaagacacgcatgtctaaaccaagtgattgcaattctttgactaatacgcggaatgattctggtacgcctggttttggaattggttcccctttaacgatcgcttcgtatgtcttcacacgaccaacaacgtcatctgacttgtacgtcaagatctcttgcaaggtataagcagcaccgtatgcttccagtgcccaaacttccatttccccgaaacgttgtccaccaaattgtgctttaccacccaatggttgttgcgtaaccaatgagtatggtccaattgagcgggcatgtaatttatcatcgaccatgtgagccaatttgatcatatacatgacacctacggagattcgaccatcaaatggttctccagtacggccatcatacaaaacggttttggcgtcgctagccatgccggcttctgcaactgttgcccagacatcttcatcgctggcaccatcaaagactggtgtagcaacgtggattcctaattggcgggcagccattcctaagtgtaattccaatacttgtccaatgttcatccgtgaaggcacccctaatgggttcaacatgatatcaactggtgtaccgtctggtaagaaaggcatgtcttcttctggcataatgcgagaaacgacccctttgtttccgtgacggccggccattttatccccttcatggattttccgtttttgaacgatatacacgcgaacgagcatattgacacctggtgacaattcatcgccagcttcgcgggtaaagattttcacatcatggacgattccaccaccaccgtgaggtacgcgcagagaagtatcgcggacttcgcgggctttttcaccaaagattgcatgaagcaagcgttcttctgcagatagttccgttacccctttaggcgttactttaccaaccaacagatcgccatctttgacttccgcaccaatgcggatgatacccatttcgtctagatctttcaatgcgtcttccccgacattcgggatttcacgagtgatttcttcaggtcctaattttgtatcacgagcttctgattcatattcttcaatatgcacagaagtgtagacatcatctttcaccaaacggcggctcatgatgatggcatcttcatagttgtacccttcccaagtcatgaatgcgactagaacgttttgtcctaatgccatttcaccattttccatggatgggccatctgcaaggatgtcgcctttttctactttttcgccaagggctacaagtgggcgttggttgtaacttgttcctgagttagaacgacggaatttcgttaccgaataaacatctaatgcgccattgtcgcgacgaacgcgaatttcagcagcatccacatattcgacgattccatcttgtttacacaataatgcagcacctgagtcatgggctgatttgtattccataccagtaccaacccatggtgatttagggttgatcaatggaactgcttgccgctgcatgttggcacccatcaaggcacggttggagtcatcgttttccaagaatgggatacaagctgttgcgactgcgactacttgtttaggtgaaacgtccatgtagtccactttgtcgatcgacacttctaagttttcagaagtcgcacgagccataacaacatcattcacgaatgtaccgtcttcattcagcaaactgtttgcttgggcaacgacgtaatggtcttcgatatctgcagtcagatagtcgatttgatctgtcacacggccagtctcccgatcaacacgacgataaggggtttcgataaagccatatttattgactttggcataagacgccaagctattgatcaacccgatgttcggtccttcaggcgtttcgatcggacacatccggccatagtgggaatagtgaacgtcccgtacttcatatccagcacggtcacgcgtcaaaccaccaggtcctaaggctgataaacgacgtttatgggtcaactcacccaatgggttggtctggtccatgaactgtgacaactgagaagaaccaaagaattctttgatacttgctacaacaggacgaatattgatcaattgttgcggtgtcaatgtttctgtgtcttggattgacatccgttcacgaacgacacgttccatccgagcaagtccgattcggaattgattttgcaataattccccaactgaacgaatgcggcggtttcctaagtggtcgatatcatcaacattgccgataccttccattaaattgaagaagtagctcatagaagcaatgatatccgctggacgtactgtacgaacggtcgtatctggatagccattaccgataacattcacttcttgttctggatcttttggtgaaaagactttgatgacttgaacagtcattggttctgtaacaacaccgtcttctgatgggtagtaagtaacactatttaaaccattatcgataaaggcacctaatgtttccatcacttggtgagtcaacacagttcctttttcgacgatgatttcgccagtttcaggatcaaccaatgtttctgctaatgtcaaattcaatagacgtgttttcaagtctaattttttgtttactttgtaacgaccaacatttgctaagtcatagcgttttggatcgaagaagcgagcattcaacaagctgcgtgagctgtcagccgttttgggttcgcctggacgcagacgttcgtaaacatctttcagtccttcttctgtccgagagtcgcttgcatttttgtgcaagtctttttcgattgtgttgcgtaacgaatcactgtctccaaaaatttcaaagatcgtgtcatctgaaccaaaccctaaggcacgcactaacacagtcaaaggaatcttccgagtacggtcaatacgtacataagagatgtctttcgcatctgtctccatttctaaccacgcaccgcggttagggatcacagttgagccgaatccttcttttccgttcttatcgactttcccatggaaataaacacctggtgaacggactaactgagaaacgatgacccgctctgccccattgatgataaacgtaccttgttccgtcattaatggaaaatcgccaaagaagacttcttgtgacttgatttcgccagtttcacggtttgttaaacgcaatgtgacatgcaaaggtgccgaatagttggcatcatgtgcacgagcttcttccactgtatacttaggttctttcaattcatagtctacaaattctagggacaaattgccgttaaatccttcgattggcaaaatatcttcaaacatttctcttaggccctcatctaagaaccattggtaagagtcggtttgaatttcaatcaaattcggtaattctaatacttcactgatccgtgcgaaacttctacgttcgcggtgctttccgtattttactacgtgtccagccaagctcttcacctcttcataaagtctttcaaaaaggctatccgattatttacaaaactgtaacaaatattaaatatatattacagaaagcattttttgcggcttttaggcaaaaaaaaaccaaaaatagaacagatgcaatgggcattttctacttttgtttccttattcccaagccgaaacggacaatatttcgtttctgcttttttctttcagatagtttttgcaactccctattatacagatgaagcacattgatgtcaagctttcattgaaagttgcaacgcttttccgatgcatgcaaattctaagttttctttaagaaaggattctctaaaattagaaaaaatgacgagaaatttctttgcattttcttgttttcttgctatgctagcaaaaaaagcatgagcgttacacgtgaaacattttgaaaggagcaactatgacaactagagaaaagattttggcattgttgcaacaagaaacctccgttttatccggagaaaaaattgcccaaaaattggacatatcacggactgccgtctggaaagcgattaaagaattagagaaaaaaggctaccgctttgaacattcagccagcggctatcgctatttatcagcagatcgttacgaacaacgcacgttacaggaagcactgccgatggtagcaacgatccagatcgctgaccaagttgagaccacgatgaaagaagcaaagctagctgctttatctgaactttcgactccggctctatttttagcagaaacacaggtaggcgggcatggtcgattcaatcgtcctttcttttcacccaaaggaaaaggaatctatatgagcttattgctgaagccaaatcataccttcagcgagttgcctcaatacacattattggcagcggtagctgtggcacaagcaatcgatgagttgaccggcaaagaaacacaaatcaagtgggtcaacgatatttacttagaaggaaaaaaagtctgcggtattttatctgaagccactagtgactttgaaagtggccgcatcgcttcgatcgtcatcggcataggcatcaactttgcgatccctcagacagctttcccagaagatatccagcaaagggcaacctctctctttccaactggggaagctcctgtcaatcgtgcgcgcttgatcgcagcagtatggacacgcttctttgacttgttggatcaattaccggctgatgattatctaactatttatcgtcagaaatcatttgttcttggtaaaaccgtttgcttcacacaacaaggcatccgctatgaaggagtcgcagagtccatcactgctactggtgaattagtggttcggacaacagatgatgtcaaagtcctttcttctggtgaaatcagtctggagaaatattcttagcagcatttttttcaaaaaaccaaacaaagacccgtcagatcaagaaagactgctcttacgatgcagccattctttgtctgacgggtttttgtcttgctatttagtgaacgagcatttgccagatcaggcataaaattaggcctagagcatagctactgttaaataaaatcatgtttttgattgaataaccaaagcttcttgggtgaggcaaacttgcttgatgctctttcaagttttggcgaatcttcggtaaggttagaaagacgagtaagatcggccactgataaagaccaaacaaaaatccgatcaaaatcgcaccgtaggatgccagcatcaatccttggaaaagatgaatgccgttggtccgaccaatgtaataaaccaatgtgtaccggtggttctcaatatctgtttctaaatcacgcaagttatttgccaacataatattggcaatcgtaaatacaaggggcaaggatgctaatacaatggcacataccgcccacagatgacccactaatccgaaggttccggtcgcaaaatcaatgtctaaataaaaaactttttgtgtgacagtgttcagatagatggtgatggcaaaaatacctaatcccatcgtcattccactaaagacttcccccaatggcatccgagataagggaaccggcccaaaggtataaaacaccccgataaagcatacgactaatcccatcagcaataaaagccagcctgtcatccaagtcagataaagaccgatcaacaacgttagcgccaacatgccaaaaatcatgttccgtacaagggtttcgggaatcttttcccgaccgatcacattttgttcatacttataaaccttagactttgcttttttgaaatccatgtagttattgatcgatgttgtcgttaaatcaaacaagatcatccctacaaaaaatataacggtgttcaatggatggaattcatggaagtatacgagagaaaacaagattcccataataaacggaaaaatacttgcaaccttagtccgaatctcaacaacttctaaaaatactgcaagagacacaagatccctcctcttattttaaatcggcacgatcgcccatcgtgtaacctgattcttcagacagcttaaaggtatctttgattccatccgtaacatagacgatcccttctttcgtgatgaagatcgcatctgttcctttgtcggtgtgctgctcgatatattctaaaccagctttgatccctttatcaaaaaccaccgtcgtcaaaccatcgccatcgatcgatttatctgtgatcacagatacactggcaatgtcattgtcatacggataccctgtttctgaatcaaagatatggtgataggttttgccgtcgactttcaaatagcgttcatagattcctgaagtgaccaccgttttgttggtttctttgatactgccaataatggaaccgcgggcttcgttgggatcttggatccccacattccaaggttcgtcttcaccacgattgctatgtcctaacacatagacattgccgcctaagtcaacgattgccgaggtaaccccttgttccttcaatactttgactacttcatccgtgatatatcctttagcgatcgctcctaagtcaatgatcatatctttgtcttttaaatagacggtcttctcatcatcattgaactcaactttccgataatcgatatgttttagtgcttcatcaatttccgattgttccggtttgcgagcatcatcaaatccaatccgccacaattgggtgatcgcaccgatagccatattgaacccgccattagattttttgctatagtcataggcatccttcaatagaaaataaatatcatcagaaactttgactggtttgattccagcttgggcattgatctcgtcaacttctgatcctgcttggttgatcgtaatcttgtctcccaattctttgatgcgggcaaacgctggtttcatcgcagattctttgccttcatcgtaaattctgatgcgtgtatacgtgcctaataaaaattcttcttgaaaatatggttcgtctcttaattgaacagtttctttttcactgccgcaagcggataatattgtgataaaaaaaacaatcaatgcaaaaaacggtaatttctttttcatggtcttcctcttttctgttgtattcaattttattataatagctttttttttctaaaatgaaaagggttggcgccagaatcttagtttcttttgcgattctttaatctcttctgtttctttatcagacagagggagtccacgtaggaaggttttctactagaatttttttattattggtaggttatttagcgcttttgaacataaaaaaagcggtactctacatcagaataccgcttgttcatttatgaattattcagtgacgatgttgtccacttggataggtgtttcgtcccctttttctgctgcgttcaacaattgttgtgcatagatcacgaagctgtggaagctgtgtgtcgcaccagaaacaacatccatatcagcaactgaaccatcttcagcatttactgctgtcacgaatgcttcgttgaagtttggaataaattcttctgggtttgtaccagattttgctttcatgttttcgttgtattccgcatcatcttttttagatttgccatcttcgttaacatagtcatagttagattcagacactttgccgtctttgacagtgattgagaatgctacacggtagccatttgaatagttcttttcttctaagctatacgtaccatctttcaagtctgcaccgttgtcgatctcgattgtatctgtgttgcctgcttgagcagcttggatcaattgttgtgcatagttttggaatgaatcgaatgagtgtgtcgcaccagaaacaacttcaattgctgaagggctttgtgccgcaaccaattcttcattgaatttaggaataaattcttctggactgattcctgctttggctttcatgttttcgttgtattccgcattttttgtttttgattcgccgtctgcattgatgttgtcatatttagattcagtgattttgccatctttaacagtgatttcaaaaactacgcggtaatcatttgaataatttttttcttctaatttatatgtgccatcttgcaatggtgctcctgcgactactttcgcttctgattcagaagttgctgttgctgattcgctgctagcgacttgtgaagtactttcttttgttgacgaagaagctgacgtgttgttgtcagatccacaacctgctaatactaacgctgagaatgaaaataccgccatacctaccattaatttctttgctttcataatgctccaccttttactaattattttcccacaaaaaaagtttgtgattcatctaacattttaaagtaaattagaaatatgtcaaccgcttccctatagcttttgtgaatatttttgaactttttttgattttcgcaaattttcacgaatttcatgaaatatcgtattttcctatcagaaaagttagacaaacgatggatttctatatataataggaacgattgtgtatttattatcatagattattttttttaaggagagatttgcaatggcaaagaaaagcattgtcgttgtcggtgcaggctatgccggtgtttcagcaaccaagtacatggcaaaaaaattgaaaaaagacaatgatgtagaaataacattgatcgatcgtcactcttatcacaccatgatgaccgaactgcacgaggttgccgggggacgtgtcgagccgaccgcaatccaatatgacttgcaacgtttgttttcacgtaagaaaaatgttcgcttagtaaccgacacggtaactgctatcgataaagaaaagaaagtcgtacaaacaaaacaaggcagctattcctttgattacttgatcttaggtatgggtggcgaaccaaatgacttcggcactccaggagtaaaagaacacggatttactctatggtcatttgaagattctgttcgcattcgtgaacacatcgaaaaaactgttgctaaagcagcaatcgagcctgatgcagcacttcgtaaagcaatgttgactttcgttgtctgcggttctggctttaccggtattgaaatgatcggtgaactgatcgactggaaagagcgtttggctgaagactacaaattggatccaagcgaaatcactttgaaagtggtcgaagcaatgcctacgatccttaacatgttggatcgtaacgatgctgccaaagcagaacgctacttgaaacaaaaaaatgtcgaattagttctgaacgcaccaatcgttgaagtggctgaagatcacatcaaattaaaagatggttcaacgatcccaacttatacactgatttggacagctggtgtgaaaggaacgagcgacgctgcagactttggtctagaaactgctcgcggtttccgccttgttgctaacgaatatatggaagcaaaaggttatgaagacaaaaatatctatatcattggtgacttggtcttctatgaagaatttccaaatacaccaacaccacaaatcgttcaagccgctgaacaaactggtcatacagctgcatcaaatatcgtcgcagcgatcaaaggtggcgaaaaacacaaatttaaaggaaattaccaaggattcatggtatcgattggcgctaaatggggcgtagccaacttattcaataagattcaccttagcggtttcttagcaatcattatgaaacatatcgtcaacttgaaatacttctttgacattcgttctggctactacatgttccaatacttgatgcatgaaattttccatatcaaagatgatcggacagtggcgcgtggtcatacttcacgttacggaaacgttctttggagtgttccactgcgaatcttctacggtctggtatggttcgttgaagctttcaagaaaattctaggtacaaatggtgaagtctttaagccaggaacttggtttggcgaaggttcttggttccaaggaaacagcgtattcccttggacttgggaatatcaaactgttgctgatgcagcaagcggcgcgagtgaagcagctgacgctgccagtgcggcaagcggtgcaggcgatgctgccggcgcagtagcaacccaagcagctcactttggtttaagttatgcctacggcgaacaaccaatggtcgtgatcgaaaaatcaccagattggtttacaaaagtgatgcaatttattatgcctaacaacgatgtagcaatgttcttccaaaaattcatggtcttctttgaaattgctttagctttagcattgatggctggtttgtttacttggttagtgaatgcaacgacaatcgttttagtcttgacattctgtatgtcaggtatgttctattgggttaacatttggttcatcccagtagcctttgcattaatgaacggttctggccgtgccgttggtttggatcgttgggtgatcccatggttacaacgtacacttggtaaatggtggtacggtacaccgcgttccttatacggtaaaaaataatcgctttataaacgagactgaggcagcctgatcctttgatcaatgtctcagtctctttccaagttaagcactttttttatctactagaaaaaccttctcttaaaagtagtagaaaaccagcggattatgctagaatgagacacagaacttcaaaggagtctttctgatgaaagtaaaagaatttatccgtcgtgcccacctgaagccttgggacggggtcatcattctggtactgatacttagctcgtttttaccaattttgatttttgggcaatcacaaagtacccctactgccgccaaacaagctgttttgcgagttgatggcaaggagatcaaagagtttgatttgatcgaaggacaagatagctacacgtatcgatacgaagatccagatggtgattacaatctcattgaaatcgctggtgaccgcatccgcatcaaagaagctgactgtggcgatcaaatttgcgtccgccgcggctgggcctcaaaaaatggcgaaacaatcgtatgtttgccacataaattagtgatcgaagttcgtgcaacagatgggagtgagacagacgatctaatctactgatcgtgatactatgagtcgtttacagaaaatcattttcatctcattattagttgctcaaggagtcgttatcggtttgattgaaaatatgattccgtatccttttgcctttgctcccggagctaaattaggtttggccaatctgatcacgatcattgctttgttcactatgcctaaacgagacagttttttgctgatatggctacgtttaatcttaactacactcttaggcggaactgtttcaacattcttatatagtatgagtggttcacttttgagctatttcggtatgttgctagtaaaacaactaggacctaagcgcgtcagcattatcgggatcagtgcagctggtggttttttacacaatgttggccaattggtcacagcttcttggattgctcaatcctggagtgtcatgctttacctacccgttctcgcatttttcggtattctatcagggatcgccatcggcatcgccgccaactatcttttgcaaagagtagacacattacggcgatttcagcttgattatgaacggcaaaccaatgtcaagtggcgttctgattcaaaataaaggagtcatttatgaaacttcatccaatgtggcaagcatatcctgcgttgcaaaacgatttatctgaatcgctgcaattaatggaacaatccttgaaactaaaaaataaagcagtagaacaagcgatattagcgatgatccattctggcggcaagatgctccgcccggcctatcagttgttgttctctgaattcggagaagagaaagattctcaaaaagcagtagcactatccgcagcgatcgaaatgctccatactgcttcactgattcatgatgatattgttgatcaagccgatactcggcgaagcttgcctactatccgtgcacaattcggtaatgatgtcgccgtttacgcgggtgattatctctttgtatgctgttttaaactaatggcggattacgctggttctctcaaaagtctgcaaatcaattctcgcagcatggaaacaattttagctggagaattaggacaaatgagcaaacgctacgacctgaatgtgacgattgaggactatctggaaaacatttccggtaaaacagctgaactgtttgctctaagctgctttatcggggcttatgaaagtggggcttctctacgtttagccgatcaggcaaaaacgattggtcaatccatcgggttagcatttcaaatcatggacgatatccttgattacagccaaagcgaaagtgccttgggtaagcctgtccttgaagatgtcaagcagggggtctactcactgccgttgttgttggcactgaaaaaagagcgggcagtgctaacaccattactggagaaaaaagccgagatgaccgatcaggaagcgcagcaagtctaccaaatcgttcacgacagccatagcgttgaagaagcacatcaattagctgctcgttatacaaaaaaagccctgcaaggaatcaagaaattacctgatcctggaaaaaataccaaagactatttgtatcagatcacaaaccaaatcctagctcgcacaaattgagtggtttttctataaataatagtttgataagtgatttagaggtagctgctttcaactagctgtctttcagacaaaaaagaacgatctccgattgattagacgacacgtcttctataatcggagatcgttctttttctttacttcactttctcttgactgtttatcgcattgtaacgaactcttctgctccagtcggatggattgcaacggtattgtcgaaatctgccttagttgctcccattttgatggcgacggcgaatccttgcagcatttcgtcaacaccaattccaataccgtgtagaccaatgatcttctcttcttttcctaaacaaacaagtttcatttcacatttttgacgatagtcattcaatgcaaagtacattggtgtaaagcgtgaacgatatactttgatttcttcttcgccatattttgcgattgcagcttcttctgaaagaccgatcgttgcaattggtgggtgcgtaaaaatgactgtcggcaccaaatcataatctaaatgtgcctcagtttgaccattgaacaatcgttcagacaagcgacgacccgctgcaatcgctactggcgtcaactctaatttgccgatcacatctccaactgcaaagatcgattcagcagtcgtattttggtacttatcaacaatgacaaagcctttttcatctagagagacatctgtattttccaaaccaaggtgttgggtattgggcactcgtcccccagcaaacaacacacagtcccccgtcagtgtttgaccattttcaaagaaaaccgtatattgtccatcacgttcttcgatcctttcagctacatagccggaataaaggtccattcctgcttctcgataaatttctactaaattgtcagttaacatatgatcaaacgcccgtaatggacgttctttacgataagcccaagaaacgtgactgccaaattgctgactcattccgctaagttctgccgcaatgtatcctgctcctaagacgatcatttctttaggcacttcttttaaggcaaaaaagccattggaatcaatcgcatgttcaccaccaggaatcgacatgacactaggttttcctcctgtagcaattaagatctttggcgctctgtattcttgtccatcgaccgtcacagtatggttatccacaaactgtgcataaccgtggataacttctactctgttgctatctaagcctttttgatatgctgtgtgtaaaaaatcaatatatttttcacggttatccacaagttgcttgaaatcaaatttatccacatgtggataaataccatagctcgtggcatcacgcttaatcatttctaacatttcacttgcttgccacatcacttttttgggtacacagcccacattgacacaagtaccccccagctcattgccttcaatcaataaaactttagctccatgcattcctgcacggttagcagaagcaatcccgccactgccaccgccaatcactatgtaatcatactcttgcattattggtctcctccttaggaacaacttcattttggtgtatatcgaaggatttttcaaatcttacaaaaaaatgcgacagaaagcaccgagtcaatgataaagggagaggaacataacatgtacgaaattcaaactcgcttttagcacagtgcgctacccctcgaatctcattatttttcctttatcagccttggatacttctgtcacagtttttattttttcttccggatcatgtcgccaacctgaacaggttcagcgacgggcatcgttagaagcatcatcggatttggcgcgcgatcgatcgattcaccgtcttcattatacatgacttccaccttttgatggaaatgatggaatccaggtccataaaactcgatctcgtcccccaccgaaaacaaattccgctgccggatcgtggccatctttgttgcgtcatcataggccatgacttccccgataaacttgtattgcgggattttacgccgaggaccaaataattgctcattttcactcggtgtatggtaataaaatccggtagctagttctctttgcgctaccttccataattcatcaatccactcttgtttgcagacatagttctctggatcttccatataactgtcaactgccgctttgtacacattcgcaacagttgaaacatagtggatcgatttcatccgtccttcgatcttaaaactatcgacgccgttttcaatcaagtcaggaatatgttcgatcatggacatgtcgactgcactcattgagaattcttcttcgatcgttccattctttgtcaaactctttctttcttgtgcaaaaggcatatcaaaaagatcatatttccaacgacaagattgtgagcaaccaccacgattggcatctcgcatcgacatgtgattggacaatgtacaacgtccagaataagagatacacatcgccccatgaataaaagcttcaatctccacactcgtatttttgcggatttcggcgacttcttccatggatacttctcgagccaagacaactcgctcaagcccttcttctcgccaaaattctagtgtttcataatttgtcgcggaagcttgcgttgaaagatggatcggcaatcctggtgcttctgtcgcacagatctcgatcaaagcaggatcagacacgatcaccgccgaaattcccacatcccgcaattgacggaaaaattccccagctccttcttgattgccttcatgggtgaccatatttgctgctacatatactttagcattatgagctttagcaaatgcaaccccttcagccatctcttcataggtaaagtttccggcacgactgcgtaagccataggcgttgccgcctatataaacagcatccgccccgtaatgaatggctgtttttaatttttctaatgtaccggctggtgccaatacttctggccgtttcaatttttgtttgactgtcatttccattgctccttacttgatatcctctggattgatcgcataaaaaccggtatctaacccccgttgagctggatgtagctgacgtacttgttcactcaagctagctgcttgttcagcagtccatgtgccttcagtaagcaactgcttcgcctgtgcaaaacaagctacgatcgagacaaacgctgtccctggagtaaataaaccgtctaacttccaagtctgataccccgtttcaaaaagagactgcaattcattcatcaaattgatgtcattattggcgaaaatatgcgtgccatgactgtcttcataaatcgagtagtgggtatcctccttcttgggttctgataaaaataaacctcgctcacgagatttttcatcttcctgttgcgtataattataataattttgaagcaatggacgtttcgactgatggatgcacgttgccccatagacaagcacttccgcaggaatcgttagctgtggtgctaaaactgtcatttctccaaaggggacttctcttgctaaaactgctccaatcgcccctttttgcccccaaaaattgatttgtctagcactggtgaccagcgtctctccatcgtatacaaacggcaatgccaattccggattctttttcatacgataaatgattcctggatcgccgatagaaattttatcaacatggttggccttcaaaaaagccaagtattctggaactagcgtcattttttgcgggtgcatgatgccattgactgccgccatcgcttgttttccttctgcttgcgctaagcggatcaattcgctttgttcctctcgtgagaaagatgtcggcaaacgcaaaccgaaagtttcttctccgaaaaaaatagtatctacataaggtaagagctgttttgcttgttcgatcgactccaccgttgcgataatctcaaccatgatattcctcctctataactcactaatagtatcacaggcaacacggctttccaagacttccttttgaacttttttcactaaaaaaaggaatactcagcgatgagaactggtaatacaactttaacactcttttaaatttgtgaactttatgagtttttatctccagttcaattgttcgaattccaacaaatactatttgcccacaaaaaaactatccaagcagcaaacgatggttcagcctgcattctgctgaccatcagtcgtttgctagttagatagttttatttttctttatgagcttatacttgttgaagaatacgagattggccttcttttacattcaatgtaattgagcctttcgatgccccaatcgtcacccggtcacctaaatggatttgtcccgacaatagtgcctcgcttaagcggtcttcgacctctttttgcaatgctcgacgaattgggcgagccccatattctggatcaaaaccagctttaccgatgacatcaatcgctgcagatgtgatcttcagttgaatgtcttgatcactgagacgtttgatgatcgctttactcatgattttaacgatttcatgaatttcatcttcacctaatgaacggaagacaactgtttcatccacccgattcaagaactcaggacggaatgctttcttgagctcttccagaatccgtttttgcatcgcttgatggtctttgctaagatccaccacattgaaacctacattcttttcttcacgaatctgttgtgcgccgatatttgaggtcataatcaggattgtattacggaaatcgactttccgccctttggcatctgtcaaatgaccatcatcaaggacttgtaagagaatattgaagacatctggatgagctttttccacttcatctagtaaaatcactgaataaggttttgaacgaatcttttcagttaattgtccaccctcatcgtaaccaacataaccaggaggggatccaatcaaacgacttgtactgtatttctccataaactcagacatatccacacgaacgagtgaatcctcactgccaaacattgcttctgccaaggcttttgccagctctgtttttccgacacccgtaggacctaggaacatgaatgaaccaattggacgattcggatcttttagaccactacgtgctcgacgaatcgaacgtgcgactgctttcacagcttcttcttgaccaacaactcgctgatgcaggattttttctagatcgagaagccgttcactttcttttttctccatttgctgtaaaggaacgcccgtccattgcgacacgactgccgcaacatcttcgccagtgacactgtctgcgtagccggaagcttctttcacttccatgaatgcaacttcagtcaactgctgggtcaatttcttctctttgatgcgcaaacgagctgcagcttcaaagtcttgttggcgaatcgctgcttctttttcttcaatcagattggcgatttcattttgcaaatcggccaactcagaactttcgtctgttttatccaagcgcacttttgctgccgattcgtccatcaagtcaatggctttgtccggcaactgccgtgaattgatatagcgtaccgacaattggacagcggcatgcagggcatcatctgaaatctctacgccgtgatgctcttcataacggggacgtaatcctcgtaaaatttcttctgcttcttctggcgttggctcatccacttgaacacgggcaaaccgtctttccaatgcagaatctttttcgatatacttttgatattcatctaaggtcgtagcaccaattgtttgtaattctccgcgggctaatgcaggttttaatatattcgatgcatcgatagcaccttccgcaccaccagcaccaatcagtgtatgcagctcatcaataaataaaatgatctgtccatcttggtaaatttcgtcgatgattttcttcattcgatcttcaaactcaccgcgatatttcgtgccagctactaaagcacccatatctaacatcattaagcgtttgttctgcatatcttctggtacttcaccgtgaatgattttttgtgccaatccttcagcaatagctgttttaccaacccccggttcccctactaaaacagggttgtttttggtccggcggcttaggatttgaatcaatcgtttcacttcttttgctcgacccactactggatctaagcgtttatctcttgccaattttgttaaatctcgagctagtgagtccagcgtcggcgttccttgtgcttttccttgaggacgacgacgacccgcaccaccggcattttttgtgtcattgatacccatttttttctttaataactgccgcattttagccaaactcaaacctaagttcaacatgattcttgaggctaaaatatcttcatcccgaagcaatcctaacaaaagatgctctgtgccgatttgaagagcgcctaaacgcttagcttcatctccagcgtaagcaaatgtttgcttcgctcgtggggaataggctagataggcattctctggatattggcgaacagttccgtaacctgttaaatgctcgatttcttcgcgaatatcattttcagtgatattcatttcccgtaacgttttgccggcaatgccattttgttcaatgactaaggcaagcaagatgtgttctgaacctacggactgatgtttaaagtactttgcttcttcctgtgcgatcgtcagcacagctttcgctcgttgtgtaaatagttcatccatctcattcacttcctgtcttcataacttaaacgttctaaaattgcatggagcaagtctgctcgtgttcgattttcataaggagaacgtcctaatactgacttcgcaatgacggtcaacaataaattgccctcacgcttcgacaggattccttcctcataaagtttttggattattgcataagcatctttttccgagatggtttcatcaaataattgattcatttcttcaaggtagtggtggttatccgtgatctttactttttcgatacggatatatcctccgcctccacgtttgctttcaacagtataccctctttgaatagtgaaacgggtattgatcacataatttatttgtgaaggcacacaattgaataaattcgccatttcagctcggcgaatctcgattgtttcgctgtcttcaagaattttcttcaaatatgcctcaatcaaatcggaagtgttatgatgattcaattcattccctcccttgactaattctgaccttcattatacccaatttttgaaaacttgaaaagatgtacgcctagagatgcggaattactaaaagaaacttaaacagctagctcttttttcgcatcacaaaaaaactatccgcatcttcaagtggttacttctacagtctttggttgccatctcactgcgacctatagagtaaacttaaaaatcattcggatagttttttcagctattgattaatcttcagagctcgttgaactcgtacttgttgattcactgctagcggaggattcactcgtagaggactctggttttggtcctttagaaatagtaacatttactgaagaaccaacagccaccgaagtcccttcacctggcgaaacatctgtgacttctccagccggaacagaatcattgtagcccgattcttctttgatcgaatattttaacccagcctcatttagtgctgctacagcatcatttcgactctgtccaatgattcgtggcacattaaccatctcttgaccgctgctgactgtcagcgtgataacagtttgagaggtaatgactgattctcctgctcctggcgcttgattaatgacagtccccaccggttcatcgcttggcgctgattgttcataaatattttcggttggaactccttttgaggtcaatgccgcccgtacatcttcgattcgctgaccataatagtcttccattgcaaacgattcaggtcccgtgctgactacaaaagtaatgtcatcctctttcggagaaactttctcgccgacatctggtgattggctaatgatcagaccttctccgatagcatcactggatttggtctcttctttgatttggtcttctgaaaaacctaacttgatcaactcggcttttacatcttcaaaatttttctcttcatagttttttaaggtgattttttcagtccctgagctgatatacaaagtgatctcgctattttttttgacttcggttccttcttgtggatccgttttaacgacattgccttcttcaatctcatcgtcagcaatttcttcggtttcatcagcaacttttaatcctgctgcttccagcttttctcgagcaacggtctctgtgtctccgctgactttagggatctcaacatcgccgcgccctccgccaaaaacaaaatagccgccaatgaccagcagcgctgcaataactagtattggcaggatcagccaccatttcttccgcttcttctttggtttttcttgtttctggtctgcggtctcttctacttctggctccgtcactgccggttctgcaggctgttcagctatcatttcatcggtaataggggtcagcgctcgagtttcatcgtttagcgcatgtggctcccaccttggttcattcaagcgctcaggtgacagggctgttgaaagatcttctcgcatttcatcagcggtcttataacgatcggcttgctctttcgctgttgcctttaatacgacattctctaatgattgaggaacatttttatcatagatacgaatagaagggatctcatcttgaaaatgttttaaggcaattgtgacagcggactcaccatcaaaaggaactttccccgtcagcatttcatataggatgattccaatcgcatagatatcagattggttagtagccatacttccccgtgcttgctctggcgataagtagtgcacagagcctaacatcgagttggtttgggtgatcgatgtttccgataaagcaatcgcgatcccgaaatccgtgatcttaacgacgccttcttcattgatcagaatgttttgtggtttcaagtcccgatgaatgattcgatgttggtgagccaatgccactgctgacaaaatttgttgcacgatatcgacaatctgtagataaggaactgggtaatgggtttgaatatatcgcttcaagtccatgcctttgacatattccatcaccaaaaactgcatcccatcttcttcgcctacatcatacactgttacgatattgggatgaaccaactctgtggcagccaatgcttcacgctgaaagcggcgaatcgcatttttatcattttggaagtcaaatcgcaatactttgacggcaacttctcgatcaagaatcaaatcatgagccagaaatacatttgccatgccgccactgccgatattgccaatgattttatagcggccatttaactttttccctatttcaatcatgggcagttcctccaactttgatcagtaacactgtgatattatcgactccgccttgttgattggctgcatcgatcaactgctgaaccgcttctttaagggacgacgcgccttcaatgatggctgcgatcttttcatctgccaacatgtttgtcagtccgtctgagcaaagaagcaagtaatcactttcagcaaaataatgaatcgctacatctacttctactgtattaggcattccaacagaacgagtcaaaacatttttgcgtggatggttcagtgccatttcagcagtaatttggccagatttcaccaattcattgacaagagaatggtcttcagtaatttgtatcaactcatgatcccgcaaaatataggcgcggctgtcgccaacattcgcaatcgtaaattgatcctcaaagagtgctacagcaatgatcgttgttcccatgccattcagcgcctcatcctcgatgcctttttcatagatcgagacactttctgcctggattttttggatcagccattgagcagccttttcactatctgtcaattctgttttttcccaagcggttcccaagccactcacagcctgacgactcgctacatcacctgcccgatgtcctcccatcccatcagctaagatcgccaatgggatactttttttgttgacatacacagcagcaaagtcttggttcgtattccgacgtttaccaacatctgtttgaaaatggatttccaacttcttttcacctcattactttttgcgaaggcagcttatgaaaaagccatctgtcataaaatcttgcggataaatcgttagcatctgatcattgatattcgcagcaatatcagcatttaccgatacatcgattcgttcgaattctggatgatccgctaagaatgcctccactactgcctgattttcttctagcattatagtgcatgtactgtagatcattatacccgaattttttagcgttggggcggcactttctaaaatcgctaactgaatttcgggtaaacgctctagatcagctgcctgcttgttgtatttgatgtctggtttacgacgcatcaatcctagaccggagcaaggagcatccactaagattcgatcaaactgttgttcctcaaaatgttgagcgacttcccttgcatccatcacttccgcttgaaccacctctgagaccgcaagtctttcagcattttcagtgatcaatttaactttatgaggatgaatatccaatgcagtgactttcccacctgcttctgcagatagaaaggacgcgatatgggttgttttacctccaggcgctgcacaagcatccaatacttggtgctctggtgcaatgtgcagtgccggtgctactaacatcgaactttcatcttgtattgtcaataatccgtcatgatataaagaagagccggctaaaaatcctttatcagccacaatcccatacggagatagttggctttctcgagcttcgattccttcttcctgtagttgaaggatggcttcgttgcgagtaattctttgtagatcaaggcgtccactagcatggctaggtactagtaaagacagccctaactcccgggttttatcgctgccgatctgcgctacgaatctttcagttagccataatggcatactgatttctatagctaaccgctccaagggatctttgatttgatcaagtgccggcacaccctctctttgaatcgtacgcaacacgccgttaacaaattttccgatccctggatttccttttgctttcgcgatttccacggcctcatttaaaatagcatgattaggtactttgtccaagtacagcatttggtaaagagaaagacgcaataatgatctgacccatggatcgactttttttgcattcttgataaagttcgctaaataataatccaatagcagctgccgactaatggttccatagaccatttctgtcaataaacgtccatctttatcatttaaacggccttgattcatcagttctctcaataataagttcgaataggcaccgcctctttcgatacgaactaaggcctctaatgcaacaaagcgaacagtatattggatttttcctattttacgcttcatgagtaccaaccttatcacctagttgaatgtgttgcccagtgccatttagaaaagccgcaatggattgacgaccttttccagctggttgtagctcttctaaagctaaaactgtctgttgaccacaagcgatccatagcgcctttttcgttcgttgtatgatggttcctggcgcggcatctgttgtttcatcgactactgctactgaccaaatcttccaacggctcccttggtaagtcgtgaaagcaattggccacggtcgcatccctcggacctgattgtcgatctcctgtgctgtctttgtccaatcaattgcttcttgttcttgcgtaatattgggggagaatgttgcctgctcttcagcttgaggcattggtttcagttctcctgataggatcttaggtaatgttttcagcagtaattctttacccaataaacttaatttctcaaacatagtccccacatcgtcttgattagtgatcggcagtttagcttgagaaaaaatacccccagcatccatttttttaatcatttccatgatggtgacacctgtttccggttcgccttccatgatggcatagtgcactggggcaccaccccgatactttggtaataaggaggcatggacattgatcgctccaaattttggtacttgcaacagcttttccggtaaaaattggccaaaggccgcagtgactaaaatgtctggtgctaattctttgatcgtttccatttcaggtgaaccgctgattttttctggttgcaaaaccaacaattggtgcttcaatgatgcttctttgacaggcgttggcgtgattactcgttttcgacctacgggccgatccggttgggtcactaccgctgcaatttcatagccttctgccagcaatccttctaagattggtacagaaaacgcgggggttcccataaagacaactttagtcattttcgtgttcctccatatattgttctagttcagattctgggatcttatcgatcattttatcaataaataagacaccattcagatgatcaatctcatgctggatagcccgagccaagtagccaaaagcttgaacctccatttcttctccttcacggtcaaagtagcgaaccgtaatctcatctgctcgcttgaccgtaccataggtatgaggaatactcaagcacccttctacatcaacagattctcctgatgactcgatgatttctggattaatcagttcgaaacgatcctcttcatctacttcaacgattgccacttgcaggtttttaccaatctgaggggccgcaatacctacgccgtcatgcgccaccattgtttcatacatgtcttctagtagttgtaccagctcatctgtaatcatagataccggttttggttttcgacgaagctgatcgtcgggatgaataataatcggatagcgcataatatctcctttaaataaaattcaacggttcttggtcaatggaaacgtagagtccttttcgctgatcgatctgactttgttccaataaccgggtcaacagttcaggcaaatgtggttcatttttgtatttaataatcagttggtagtaatagcgatttttgacacgcatgatcgcgctaggtgccggtccaagcaaaatactttgacccgataattctttttgtacttcttggtaaatggcaaacatcttttgggcagctgcctgctcttcgagatgactgcaggtaatttttaccgtgtagtaataagggggatatccgctttgatgccgaacccacatttcttgttggtaaaaagcttcatagttttgggtttgtgctagctgaatcgcatagtgttccggattaaatgtctgaatgattacttcgccggctttctccgcccggccagctcggccgcttacttgcgtcagcaattgaaatgttcgttcactagaacgaaaatctggcagattcaatgctgtgtcagcatttaagacccctaccaatgtaatatccggaaagtctaaccctttggcaatcatttgtgttcctagtaaaatgtctgctttcttttcgccaaataaagtaagtattttttcatgtgctccttttttgcgggtagtatccacatccatccgcaatacccgtgcttctggaaatctagcaattagttcttcttcaactttctgcgtacctgttccatagtaacggatcttatctgcatgacaactaggacagcggtgagggatcttttcttcatgcccgcaataatgacagcgcatcgtcttggtatccatatgaagcgtcaaagaaatatcacagttcggacaaggcagaacatacccgcaatcacgacacataacaaaagaagaatacccgcgtctattcagcagcaaaacgatttgttcttgtttatctaagcgatcttgaattttttcctgtaattggcgagaaaaggtctggtagtttttgttggcaaattcttcccgcatatctactacattgatctgcggcaaacgagcactgagttttgctcgttgattcaaacgcaacaattgataaacgcctttttgcgcccgagcccgtgactcgagagagggagtggcactccccaaaacaacaggacaatgatgatatcctccgcgccatatcgctaaatcacgcgcatgatatcttggtgcctcctcctgcttatagcttgcttcatgttcctcatcgacaataatgacgccaatgttttttaaaggagcaaaaatagctgaacgtgcgccgactactacttgggcttctccccgttcaatttttcgccattcatcatatttttccccttgtgacagtccactgtgaagcacagccacagcgttacctaagcggctcttgaatcgttccaccatttgtggggttaaagcaatctctggcaccagcataatggcagtctttttttgttccaaaagctcagcgatcgtttgaagatagacttctgtcttcccactgccagtgatgccttctaaaagaaaggtttgtgcctcttgtctttttgctgctgacagaatttttgaaaccgcatcggtttgttcttcgttcaatgctaatgctgcagtttggggaaatgatcgatctttgaaggggtcccgatatgtctcaacctcatgaaattcaagccagcctaatgcttgcccttgattcaagacagctgtcgaaatgcctgcttctgcaaaaaatgaaacaggaagctgatcagattcttgtaagactgtcaatagttgttgttgccgtttagcccctttcctgatttgcttcattgcctctggaattgcttctggagagatcaggcgtttcaccatacggattttcttggctttatttttattttttaccacatattgcaattcaacgactgcttcttcacgcaatactttcaattgcgacaataatcccgcttcctcagcagcttgccagctcaggctattcgtctcaggaaaatgcgcttttattgggtgcgtatcatccaataaaagaatattcttctggtattctgctttcatcacactaggcaacatggtctgcaagcaggtaatcttaaaagcaaatgtcgtttttttcatgtaatcagctaactgtaataattcttcattcaccacaggagaaagatccagcaagcgaagaataggtttcaatggttgacctggcggtgtatccgtcaatcctacgataaagccttggatatgccgatccccattaccaaatggcacttcgactcgcatgccagtctctgctacagcgcgcaaatattcaggtatttcatatgtaaaaggttgatctgtctgcatcgttggtacatccacgatcacttctgctgcataggtcatcttctctcctcctccaggctttattttactaaaatgacagacatttgtctgtaaaccttacgaaaatttaacggctatcgactcaaaagaaaaagccagaacacgcattgtgctctagcttttttaattgtctacagattctgttcgtcacgaatccgggcttccagttctttttgctcttggtctttttgcgctttgcgctcttcttgttccattttcaagcgagcacgtttgatttctggatgcggatcattaacaacaagctctgcttcgatttcttccaatgcttgtcctacgcttttcaccgaatcaaattgttccaatgttgcttgggcgcctgcatctagttcatgcgcgcgtttgctggctaaaatcacaagggaatactttgagttcacacgatccaataatgaatcgattgaaggttttaacatcattcgttttacagctcctctaacattttgatatacttgccgattactcgatcaacgcgaaaatgttcacttgatataatttctcgaatccgttgtactgctttagatacttcatcatttacgactgcgtagtcatataaagccatcatttcgatttcttctctggcaacacgcattcgttcatcgatcacttcagcagaatctgtccccctgccagtgatacgtgagcgtagctctgctaaatcaggtggggtaagaaaaataaagaccccatcaggcacttcttctttgacttgtttagctccttgaacttcgatttccaagaaaacatctttcccttggtccaatgttttttgaacataagacaacggggtgccgtagtaattgccaacgtattctgcatattccaacatttcgcctgcttcgatcaaggcttcaaattcctcacgggtgcggaaataataatcaacgccttcgatctcaccttcacgcttgttgcgtgttgtcatcgaaacagaatattgaaaatcgttgtcatcactttcaaaaattgcttttcgcacagtgcccttgcctacaccggaaggtcctgataaaactattagtaatcctcgctctgacataatgacgtcctttcactgacttttgcttaacgtctattttgcactttttttcagcaactttcaagaactactttattataatgggaaattcatgaaattactactcatctctcctacttttagaaccccatgttgcttagcgtattgatcacacctgccaactcatcttttgtcgtgatagctttctccgtaggatcttctacttcctggcaatcaatccgaacgatataccgacgattcaacgataccgcatttccattgaccaaaatttgcaagaactcttgatcaatcgcgacacaagcatcttgccaagcatcaaagtttgctttatctgatgggacgctccgcttgatgacgttttttccgcttaattcatgaaaagtaatatcatagtatttcattgttgatcactcctattcgatattttggacttgttctcttattttttcaataatcgtcttcatctgtactacactattcttgatttcaattgggcttgacttggaacctatggtatttacttctcggttcatttcttgaatcaaaaaatccagctcccggccgatcggcgattttgcctctaacaaagtagtcatagaatctaaatgaatcatcattcgatccaactcttcatgaatatctccccgctccaacaggatggccatctcggtcaacaaacgttcttgatctacttgctcgcctaaatattccgtcagctttttctcaaaacgttggcgatgatcggcttcataaacggcaataaacgtctgtaattccatgattttaccaagtaattgctgctgattttcttttaacacttgataaatcccttgtccttcaatttcacggctttgatcgatagctgttagagcctgagacaaagcatctaacacaccttgctctaactgggtatcttcttgttgtttttctcggatatcaagaaatgcttcatggacgattaatttttccaaaagattttttttcgacagctcttttatatccaacctttgagcagcttcttcttcgacctgcttcaaaaaaggcaccaataaatcccattggactataacttctttatgagccgcattcttttcgttcaatgtcagataaagctccacccgaccacgctgtaatacttttttgacttcttgtcgaattagtgcttccaaatcattcaattgtttgggcatgcgcaactgcaaatccataaatcgctgattgacacttttaatctcaatctctatttgataatcagctgtttctccattcccttttccaaaacctgtcatgcttttcattcatttcttcctttcacatagaaagcagtgcttttttcaattcggtgaattcttcatttgataacgttaagcctttacccattttttcatgtcctggactccagtcacgcaagtcaaacttaggcgggcgaccattccagctgactaaattaagctctttacgccaccctttaggattttccgaaagaacggcgatctcctctacgatctcataagaaaaattatccattgtgttcctctccttttaaaaaataagccagataggctgacagcacagccaattctggataccgcgcacgaatctgctgaaatgccggtgtttcaatttgttgggttcgatagaaaaacaagaaccgtttttgttcagataacaaaaagaactgttcgcgatagtaatacaaccattctgacactgaccatacttctgtttctttcgttggttctgccatgattttctcacgtatcgcttgcaggaaagattcctttgtataaatgacggtcggtgtaagatgtagtaatctgcctatgcattcaaaaaagacgcgcccacaaatttccaaggggacctcttgctgatataacttacgcactttcttccaaaattccttttttttcataaatgcgtacaatcgcggtgcatcttgtcgaagcaaatgaacgaatggcttccacgaatcgttgaagacctcttcatcaaaagtataccaatagccactgaacttgccaaagtatttcatcgtttctaaatacccaagagtcatgttttctagagaacgtttggcatcaaaaatcaaaaaactacctagagtccaaggtgaagcaatttgaatctgcgcaattgattctgagacctgaaccttcttattgattccaggtccttggacatcgacggcaatgacttctgtagcgcctcgctcaatggctacatcaattggcagattgttgcggtaccctccatcaatataatagatcccatcaatcaattgtgcctgcattgctggataaaaagacgctgatgctagcaaccattgcaaactataatcaattttgctggaatcaaactgataaacaacctctttgaaatccggcagacgagtcgtacaaagtaagagctggcttttgctggcattaaatttttctgcatcaaaagtcgctgctaacagctgtgctaatggttttgtactcgcaccattgtctttaagtgctgtctttacgagtgagcgtaattgctccatcatatctaataaggtttcttttttagcagcagcttttgggtattggaggacctgttcactagaaatattcgtccataattgctcagcagcttcaatatcgtccattaaaaccaatgcaccattcaatgcaccaactgacgtccccgctacccactcaaatatgattccatgttttttcagcgcttgccatacgccaatttgataggcgccatgggcgcctcctccacctaggacgaaagctgtatggtagtccagttgcttgtggtacccctgtgtcaccctaccatatccacgtcccacaaaccactgatccatgatggggtttcttgtcatttcccaaagtatctggtctacgaaacggcttctagcaaaactctcagtcatcgaaacaagtgtctcccaagtaaatgcatcacttggcacctgcaacaaattctgaatggtcagaagcggcccttcatggacacaagacagatagactgtgccgtgttgattcgtcaatcgccacccctgttcgttgaccactgattgaaaagcggctcgcgcctccgaatgactagaaaaaaaagggaaaactagtcggctttgttgaaacacatcttgggatacatataaatcagaaaaataaatttttgttgtcttcatccgactcctcctcaaatgcaaaaaagaaaccacggatgatcaatgaaaatttctgacatcattcgtggtattcttatcatttaaaaagtccgctgttccatattgaatgcggcccgcatctcgtctgtcgcatcagcaactggtgtaaccgattcaagatcaccctgaaccacacgtctggttactccacccatttcaccacatgtaattaatgtgatcatttttctccctgctacttcatccaataaataaacatctgttggttgaacccgcacggttgaagttgctgtatatgtataaatattttctaaatccgtaatataaattgttgcgccaatagccacatcatctaaaggtgtgaacaaaaggtctggcgactgcgcacgatggctagctagtgcataatttccttcgcccattttttgtgttgggctaagagttcctgctccatatagcaaagcttcattcgataaccccttaaaaatcggcaaattaatcgctacgctaggtatcgcaacaccaccgatcactggtaatgtgctgttacttagttgcgctttaagaactgcttctgagctggccggttcaacggcatcaaaatcaaaagtagtatctgcctccatattttttttgacatcggctctagagatctcggaaactgcgtaagcatctccgttgtgtttgatcagaaaatttttgatttgattattaaaaatcaaagcaagaccaatcaataacaaaaggaccaaaaatagattcgagagccaatggaacaaagttcgtttctttttcatcgtttttcgtctccaatttttattactcctatcataacaaaatcattgcagaagcgccaattttggattttttttaataaaaaagcaaagttttttgcttcataaaaaaacgtaatcttaaaaattgttttttccgttattttgtaatataactttaaacgaaaagatacaagcaatttgatacactttattgtagaatgaacttattatcagggagggattaattggcatgtcgaacacgatttatgtacatattgatacaaccagcaatgccgtttcgactcgcggagtggatgctcaagatttcaacaagagcatcgttcaccagccaaaaaatctgttgttgcttgatccctctagtgaatttggtgaatttgagtcgcatacagggctaaagattatccgaggcattgaagatgtccaccttttctttcaacaactcaaccgcggacggatcacagaagaaatcaaatggatcgactttaatgatttagaaatggtaaaggagctaacaccgctagaaatttcagaattgttatattttgggcatatgaaaacgcatcttcattctccgtttttctacaaactgcaaaacaactttgtttatttcgacctcaaagatcagcgttcccgtgtttactaccgctacctggaagaatattaccgaattttagctgacaaaatcacgcacatcgttctagaaaaaataaatgatcgactttctttcttcaaaaagcctactccggtctctaaacttgatttaaatcttctcaaagacttgcggggggtcatgcaggaaggaatcatcttatgtttccatcaagaacaattggtcgataaaacctacacaatcccgatttacttagtcgaggaatctgggctcaaaaatagtcacctctctctgaaagaagactatcaagtggcaacgcttcgctactttgcaaataaaaaagaatggcagttggaattggatcaagatgatctagcttttggttttatcgataaaaaatgacttgctctcctattttgattttggagaacaagtctttttttacgcagtccgatttaaataatcgtccttaggtacaaatacctctggggatgttcgataagcaattagtaagataattgccgtgacgattgccgtagcaagtccgctggcggtattcattaccagagagaaaagccaaggtttcatcccccagagagcatatgcgccccagtaaacccaaccggcaaggaaatgccaaaaataacgagcaaatgcgcctgtgaatgttgcttgtacaagtagtcgttgcacgctacccttcgaaccatttctaatcgccaaatgaattttatttgcataaagtccggcaaaaccaacaaatgtaaaagcaaatgggtactcaatcaatacttgaagaacactcaaaaaccagactttacctaatgggaaatgcagcaatccccaaaccaatccggccattaatcctggcttccagcctctacggatagcaaatattgttaatggaatctgtcctaaagaaattgaaaaactacttccaaagtctaaaggaatcagcgatagtaccatcgccagtgccgccataatcgttccctctatccaaatttttgtaccatttcccacaaaaaaactcctcctttagaatcatcacaattcacaaaggagaagtgttagacacttcaactcgtcacaattcctacgttcgcatgatcgaaacaggtacgaagggtttagagtactctcattctcagccttttcagactcccctttgtgattagattctattttattttgcttgcactgctgcaagtcatcttcaagaataccacaaaataaaaaaaagaaaagaaaactcgctctgataaaaaaagaaacatctcaaccgcgtctagacgagatgcttcttttgggttatcatttttaaatcgataattttgattcgaacagtggactaacaggtttattctcatggattcgtttgattgcttctcccatcaatgcactaacactgatttcgtcaattttttcagatttacgatcttctggcaagaaaattgaatcagtaactactaagtgctcgatagctgaatcttcgatccgttgcaaagcaggtcctgataaaacaggatgagtacatgaagcataaacactttttgcaccagcttgttttaatgcgttcgctgctagagtaattgttccggccgtatcgatcatgtcgtcgatcaagacacacgttttgccttctacgtgaccaatgatattcattacttcagcaacatttgcttttggacgtcgtttatcaatgatcgcaattggtgatttcaagaattctgctaatttacgcgcacgagtcactccgccgtggtctggtgaaacgactacaacgtcatctccttgaatatctctttccaagaaataattagcaatcaatggtgcacccatcaagtgatctacaggaatatcaaaaaaaccttggatttgtgaagcatgtagatctaaggtaaccatacgatttgcgccagctttttcgatcatgttcgccaccaatttagcagtgattggttcgcgggaacgagctttacggtcttgtctcgcataaccatagtaaggcatcactacattgattgttttcgcacttgcacgtttcaaggcatcaatcatgatcagtagctccattaggttatcgtttactggactgcttgtggattgaataacatagacatgtgaaccacggatactttcttcaatgttaacttgaatctcgccatcgctaaattggttcactgaacacttacctaattccacacctactgcagctgcgattttttcagctaacggacgattagaattcagcgaaaaaatcttcaatcttggatcaaaataatgatttgacatgagaacctccactttctttgcgttcatctggcaaaaagactactagttcaccagaatcttcttcctagtaaatagtagtcatttttgctaaataaatcaagtcatttcgcagtttcttcattcaaataaggcaatttttttgcatagccttctttgttttcctgccttgctcgggcaatcgccatgctatgtttaggaatatcttttgtgattgtagagccagcagcgatcatggtttcttcctcaatctgcaatggcgccactaaattcgaaccagagccgataaaacaattgtctccgacaactgtcttgaatttatttttgccatcataatttacaaagacgacgccgcaaccaacattgatatttttccctagcgttgcatctccgacataagagagatgccctacttttgttccctcaccgatcgttgcattttttatttctacgaaattaccaatatgggctctttctttaatgtctgcttttggacgcagatgtgcatttggtccgacatctgccccattgtagattcgactttcttccaccacagatgccttgatcgttacatcatcaccgatttgactgtctatgatttgagaagatgcagtgatgacacagtcttcaccaattttcgttgcacctttgatgacgacaccagcttcaatcagtgtgtctgctccaatttccacgccatcatcaatataagtagtatcagggtcaatcaatgtcacaccattgcgcatatgctgctgattgatacgcttgcgcatcaaacgattcgcttctgccagcgctaatcgatcattgactcctaacgactcattgaaatcatccgtttgataagcagctacaatcttcccttctgctttcaagatctcaataatatctgttagataatattccccttgtgcattatcggtatctaattttgccaatgcatcaaataataattcattgtcaaaacaatacgttcccgtattgatttcttggatcatcgcctcttccacagaggcatctttttgttccacgattttttctacgacacccatttgattgcgtacaatccgaccatatccggtcggatcttcagcttgcgcagttaaaatcgttgctgaggctttttgttcctgatggaactcaaaaagattattcaatgtctcagtcgttaacaaaggggtgtctccactgattactaacgttgttccccgtttttctcttaagaaaggctctgcttgaacaactgcatggccagttcctaactgttctgcttgtaaagcatactcactgcggtcccctaattgttgcttgaccatttctgctccatgtccgacgattgttacgattgcatcaggttctgtctccactacgcgattcatgatatgttctaccataggttttccgcaaacgggatgcaaaaccttgtataacttggatttcattctagtacctttgcctgcggcaagtataattgcaaaacgtgattccacgtgttccactcctatcgattccgactgattgatttctgtatatgtccagtttagcccaactaaggatggttttcaatatataaggaaaaacacaactagaccaattaaaaaagactgattcaaaatcagtcttttgtttcaaaataattccccggcacgaccgagatcgttttcgtctgagtatcaacgtcttcaacaaacagcagcgaactataatcagaaatagcacgttttcctttgaatttagcttccgcaaaaaccgttatgccaacaagttcagcttcaaattcttcgatcaagctcttcataccgttcacagtgccgccgcctttcataaagtcatctacgactaagactttggaaccgcgttttaagctacgctttgataattccattttctcgattcgttcagatgacccagaaacatagttcacgctgactgttgacccttccgtaattttagaatctcgccgaacgatcacaaagggaacatttaaataataagataccgcttgtgcgattggcactcctttagtagcaacagtcatgactgcatcaatttgtttatccagatacttcgaagcaatgatacggcctacttgccgcagtagctcaggttctccaagcaaatccgagagataaacgtaaccaccaggcagcagtcgatcttgctcagaaaggcgttccgctaacccttcaacataggcataggcttcttcttttgaaatctcaggcacaaaaaaaacaccgccagctgcacctggaattgtatcgagagttcccgtaccacgttctttgaaggtctttttgataatcgctagatcttcactgatcgatgatttagcagaagcatagcgttttgaaaaaaatgacaatgaaatcaattcatgcggatgattcaataaataatgtgtcatatctatcaatcgttcacttcgacgaattttcacacatgcccactcctttaatttattcgtcttattataaggctttttgcgtataaatgcgagcattatcttgaaaatctaaagaattgttcgcttttcattcaatcaaagaaaaaaagaaacgaaaaattttcgtttcttatcgttttaaccgttgttttcgttggaaaagaatgacaatacgcttgaccacattgatgactaaaaacaaaccgataaatactaatgtgatcgtagcgcctggaggtgtatcgagataaaaagagctagtcaatcccgacagcataccgaatagaccaatcaagacactgatcaaaatcaccgcattaaaactcttgcctaaacgcatactgattgcagctggcaataccataatcgcagaaatcagtaacgcaccagcgatgggaatcatcatagcgatagcaatccctgtcaaaacattaaaaagcatcgacattatccgcactggcaaacggtctacatgagccgtatcctcgtcaaaagtcaggacatacatcggacgtttgaatagaaagaagagaacgaatacagctaaaaataaaaagcctagaaaccaaacttgatcctgagtaatggtcacgatggaaccaaagagataggattggatactggtcgctgagtttcctccactcagattcataaggaccaatgctaatgccaaaccgcctgacatcaaaatcgcaattgagatctctgaataactccgataaagtgttcgtaaatattccaaaatgaccgcggcgatgattacgattaataaggtcgtgagatctggattcaaattaagaaaaaagcctaatgctacaccagctaatgaaacatgtgagagtgtatcggccatcaaagactgtcttcggatcacaagaaacacacctagcatcggtgcgattccggcaataaaaattgcagccaaaaaagcacgcctcatgaattcatatgaaagcaacgccatggtgaatcctcctttcgaaccaaccgaatttgtcgatccgcatactccttaatatcttcgtgatcgtgggtgatcatcaaaatcgatttcccatgatcgtgtgcattgtgacgcagtaattcataaaataaatttcgtgattgctcatccatccctgtcgttggttcatccaaaataaataaatctggatcagtcgcaaagatacgtgctaaactgattcgctgtttttgccctccggacagttcgccaatccgttttttgcgcatttcccacatacctactgcatccaatgctcgccgaacatgttcatgatcccgctttgtcagcttcttaaaccatcggtctttcggataacggccagattggaccaattctaagactgtacttggaaagcctacattgaacgaggcaatctgttgtggaatatagcctacacttagcttttgtccttctctgtttttggtagccagtattacttctccctttgatggtttcaacaaccctaatgttgctttaatcaaggtagattttgcagccccattttctcctgttagaatgacgaattccccatcttcaacaaaataagagatatcctctaatacaggctcatcatcataataaaacgttagtccttttacatcgatataacgcacagatgtgcctccttacttgatacttttttgtaaagcttgcagattttccttcattactgtgagatatgtttctccatcactaatctgtttttccgtcaaactttctaacggattcaatacagccaattcaaccccagtctcattcgctaaagtttccgcgactttagaagaagcattttcttcaaaatagataactttgacttgatgatcctcaacatattcttttagctctgctaaccgactaggagttggttcttgatctggagataatccagcaatcgattcttggactagatcatattgttttgccaaatatccaaaagcggcatgttgtgtgacaaatgttcgattgaccgcatctttcaaagcagcagtgtactcttgatccaatgcgttcaattgctcaatataagcagcggcattctttttaaatgtagctgctttcgttggaaatttctcgcttaactgatctcgaatcgtttcaacttctttgattgccattactggatctgtccacacatgcggatctaattcatgggtatgggcgtctgtcccatgttctgcttctgcttccgtttctccatggtcttcattttcagctaaatcaatctctttggccgcttcgatcacaactgttttgtcagtatcgatcgaatctgtcattgttggcacccatgtttccaattccggactattgtacacaaaagcatctgcatccataatttttgccatatctttcgcactaggttcataatcatggggttctgtgcccgccggtataagcaaagatactttacctgtatctccaacaacctctttggtaaactcatacattggataaaaagtcgtaataacctgcaaatcctgactttcttctgcgacttgttctgatccttttccgcaagcccctaataaaacagtactggtaagcaaaaatagagctagtaattttttcatgatgattcctcttttcttattaaaacggaactaatccgatttatcagcaaaaattactctaccaaaggaaacctcattcgtcaagacaaatcgtatgttttccgatttagggcgttcctctgccagtaaatcggaaaacatgggaaaattgattcatatatccgctaagcaaaaaacagatgtcacattttttgaatgtgtgcatctgctttttaatttgtccttttgtttcctactattttaatgtgcgaactagataaacctcttcacaaaaaccttttaaagcattatacactcgctgagcccgtgagtatttctggcacaaggcaaaaacagtcggtccacttccagtcatcagtgccacatccgcaccatatttcatcattcgttccttgatttgttgtacgactggatgcttaggaatcgtgatcgattccaaactatttcccattgcagcaatcattcgttgataatcttcagcaagaattgcatcagaaagttcttgaatatctggatgatgcaactgatctagatcaacttcttgaaaaattttacctgttgaaacacttagtcggggcttgactaagaccacccagcactgcggcatcgggcgcaacggcgtgactttctctcctttaccagagatgaacgcagtcgttccataaatgcaataagggacatcagtacctacttccattcctatatcgatcaattccggcatcgtcagacctaattgccataagcggtccatcccccttagcgctgctgcacaatctgtactgccaccgccaaggcctgctgctacagggatatttttcgtgatccgaatcaagatacctttattgataccatagcgttttttgacaatactggctgcttgatatacattattgcgtttatcgatcggcaagaaggccttattggtttcgataatgattttatcttcttctagctcttccattatcagacggtcggctagatcaacactggacatcaccatttccaattcatggtaaccgtctgctcgcttacccaaaacatcaagtcctagatttatcttagcaggcgctttttcaataatttccatcttattcacccaatcatctgatagttaactagttctatcatagcagattctttagagatagttgagatatttctcctgtttttgatctttatcagcttttgggttgctctttgaaatcgttcctcgtaaaataagagtaacaaatttgatcaagaaggcaggggaaattatggcaaatctaattcctagagatctacctggtggagaagaactattaggcaaattgatgaacagtttctggcaagaacgacaaatgaatacagatattaaagaatatgaagatcattatgtagtcaaagctgatcttcctggtataaaaaaagaaaatatccgtgttagtttcgtgaatgatactctaacaatttctgcttcccaaattgaagaaagcgaagagaaagatgatcttggtcactacttgcgtaaagaacgatctagcagtgcttatcaacgtgcattcactatacctgacattgatgaagaagcgatcaaagcacggttcgaagatggtgtcctttccttgaatttaccaaaggcaagttacaaagacgcgccaggtaagcatattccaatcgaataattgaattatcgcaaaaagtaaaaaagacttcagaaatatcagtttctgaagtcttttttgttgtatttctaccttgccttaccagtttgacgataagcttgtcgagttgttgctgtgggtatttcttcttttttgacataaagcttcaaactataaggttcatgatattttacatcatttttgacaaaatctccgccagtaatgaacaacccaactggttccaaagctttttccccgttccaataaatacggccaattgttgttaagtcactatagctcgtaccaatttgcaacgagtattcagaatctgaccgttgtttgacaaagtagtagggataaagggtatttttaggaatcacaaatccttgtgcgatagcattcgttgctaattcatcttttgaaatgagtttctgtaaatagtcagccaataccagttgatagtcttcttcaaaatcaataactgctttctctgttgataaacgatcgatttgtgtggtgctaattttttctccttcaatattgaatacttcatcaggtaaatacttcacaaaaagctgagtaatatctaccttaagatttttatcaaaaaagtaataaaaaatatttagaacccagaaatagagcaacacgcagaatcctatcccgtataaagccatctgtaaataattttgattgagatagagaccataaacaatacgcagaatataagccgttggaatcaaactaagtaatgtataggcccgattcaagtatttaggactaatatccagataacctaagaacttatgaatcccattgatcatatctaataaaaaagtcatttattcacctactcattttcttgatcctcattgatgactgcttcttggtcagccgcattctgatcctgacttgacggcgtcgtttcctcgctttgcccgttctctgaagaagggacatctgtagctggtggtgtagagctatcctctatcgaagatgaaggaacagttcgctgattatttgttgtggaagatgtagtgcctccatgatcttcagctgatgttgaaggttctgtgctttcagacacaggttgactgtctaccgattgcgagtgactaacatcgctggtttcggtcgtttcagtaatctcagtcgagtgactagttccatttgactgccgatagctactggaattcacaacaccagttgcagtagcgatgatggttgaaatggtcaagagagcaattggtttcaaaataggaggtacttttcgcataattttccatccttgtcttgattcttatcttttttgcactcattgagtacttactttctttatagttctttccttggaaatggtcaagactacgaaggattaacggaacagatttaaaaaaaagtaaaaatgttttcggttacaaacaaaaactagcttctgctaggctctaaataagaaattcgtaaaacttttgtacagaacgagttaacgcagagtgataatccactatcagctcttttaataagatcgattcttgtagctcaaatggctcagtcaattctaaagtgatccgagcaccgtcgatgaaataagcataggacagttcatcatcagacaattcggctagttgattgctccactcttcgaagaatttctccgcgagcacatctccaacttcctcaagaacaggttggagagtctcttctacttgataaaaaggtcgtgacaaaatagatgccgttgtctttgagtgggttgtattttgaaaatccaaataaagcaagtcaatgtagtcttcttcttcacctgtttcttccagccatagaatgccttgcttgaccaatgagacacatgtagattctacttcctttgataattctatagtagcatctttgaacctcagattcttttcgactatttgctcttcacccataaattgcaagacagctttttcaaaaacgagcggctcatctgtaataaataattgaattgttgccatttttttctctctttcttttttatctaatttatttttgctctaaacagattatttgtcagcggtatgaatcttcgttagcatagaaattgaagatgaataaaagctaatttttaaggaggagatttgatgagtaaaattgccactatcattaccgatctagttgaagatattgaagtaacctcaccaaaagaagcactggaaaatgctggacatgaagttgtcattatcagtaatgaaggcgtggacactgtcacaggaaaaaaaggaaccacttttgcagttgacgcgtctattgatacaatcaatttttccgattttgatgctttgttgattcctggtggcttttctccagaccaattacgtacagatgaacgctatgtcactttgaccaaagagtttctgacatctgaaaaaccagtttttgctatctgtcatggacctcaactctttattcaaaccggattgacaaaagaattaacattgactggctatgattccattcgtccagatttaacatatgcaggtgctactgtcaaagatgagcctgtggtgattgacgacacgcatcatttgatcactagtcgtaatcctgatgatttggatgcatttaatcaagccattacaacagcacttgaaggcaacaaataaagcctaaattttaaacgaagaactcacaaatagggtgtacgaatatcgtactccctatttttctatcctttagcgattttacctgctgtttttgttcgcaagttcttttaattaatatttctattcatccatagaaatgtcaaaaccatcaaatgtctcaccatcataatatttaagtaattcatcgagtgatagcaaagaagaagtcatctcctcttcttccgtttgttggtgtttttcccaatagatctgataggcttccgccaattgtcgatagacatctttccgtgaaccaccttctgcctgcagcattggcaattctcgaataaacgcactataacaaggacgaccatcttgccaactgataggtaattcaatcacatgtagttgggcttcttcaaaccatctctccatcccgatccctcatttctccctttattatcacgtgaatgattcagaaggtcaaacttcctgtcaaaatagactaaaaaacactggctaccgatggcttatccatgatttggaatagcaatcggcagccaatgatcatgcagctacataagcatatttttcaatgttttgtttgatcttctcaatgattctctgatcctctacacctgtgacttctgtgatcacttgagaaagattagctgcttccaataactctctcaattgttgactttgctcgtcctcaggatcatgatagttgaaaatcataccaatcgtttcatagagatggaacggttgcacatttctcatttgcaattcaaggacggggcggataaatcgttcttgtgcgcttaattttcgcaaaggggtgcgggctactcgagcaatagcatccgaaatgtagttatttttgaatcgttgaataattttttcaatatactgttcatgttcatcaggatcaaaatcccatttggcgactaaaagttgaccagtttcttctagaacggatttcagctgaatcacaactagatggtcacgcatggcttcatcgatggtctcatagccttgtagagctcctgtataagctactgtagcatgacctgtgttcacactaaacaatttacgctcgatataaggtttcagatctggtacgtattgtacgccttgtagacgaagcactgatttcattgctgtttcttgaactacccactcacaaaatggttctacttgaaccaacaaaggatcatcatgttgttgcatcggaacaatgcgatccactgctgcatctggaaaaccaacactattctccaggtaagcgagttgttggctatacttttctacttcctcttttagaaaagtggatccaccgatcatattttcgcaagcgatgacatcaattgcttgctcctttttcttgattgctcgctgatccagcccttttgcaatgagcggtgcaatgcgaggcaatactgcaggaccaatggcagtggttaaaatatcggcttcgacaattgcttgaacaaccgcatccggttcttttgcgttattgattcctgtcacgtgttcaataaaaatctgttcgcggttctcatctgctaattcaattgtataggatttacgttgctgaagcgcagcaataatcgtttcatttacatcaacaaaggttatttcaaaaccgtttgctgccaaaatctctccgataaaccctcgaccaatattccctgcaccaaaatgaactgctctcatctttttcccctcctatgccactgttagattagcggcgacttcttctttgctcaaagcatccgctaattcgaccacattatcgatatcgctacagaagagagcgatttgttgtaccaactgcaaatgatcttcacctattccagcaatgccaaataataccgtaacgattttttcatcctcatctgtcccgaaatttacgccttcaggcacttgaacaatgcagataccagattttttgacatatttttttgcttcatctgtcccgtgtggtatagctatgaaattccccatgtagacagataacattgcatctcgttcgatcatagcgttgacgtattccggatcaacatatccggcctcaacaagttttttcccacaataacgaatcgcttcttctttgttcgcaaactgttgattcagctcaatcatttctttttctaatagtttcatttttcttcctccttaaagagcttctttaagtgttgtgattacacgctggtagtttgacgttcgcatcaaattgctgacagatagatggactgcatctggtgctagcgaccgcgcttgctttgtcagctcttctttggtaattaccaatgatgaagcatccgcttttagattatcgatatgaacctttttaagtgataaagagagagattctttcgctaataagtcttgaaaaacctttctcgccatggtcgctgagccttcacgatcgtcatgggcaagaataacttcatgaatgccctttaattcctctagaggcagtggcttataatttactgctttcgtttttttctcttcctcaactcctgagcctgacaatgtggccacgatctcattatatttaggagaattcaaaaaattttctacagcaacaaatgttgcatttggtgcttttaattttgcccgctcttgtaactctttttgtgtcacaatcaatgtatgcgcatcatctgtcagattattgattgcttgattagtgacttgttgagccaaaccagcatctttaactttcttacgcaaaatggaagcccccattgcacttgaacccataccagcatcgcaggcaaaaataatcttctgaatgcctgttaacgattctagagccactccttttgaacgctgttttgcttggtgtatttcctgtaccttctcatcaaaattatctacagtgtctttggcatcggcttttagaattgctgccgccacaagaaacgatatggttgctccaacagcaatccctgctaaaacagagacgacactcatcaccgaattcaacggtgtcatcgctaaaatagcaataatcgaacctggagaagctggtgcccttaaacctgcacctaataattgaaaagtgaaactcccagaaacacctcctgcaataacagctaaaaacattaatggcttcatcatcacatatgggaaatagatttcatgaataccacctataaagtggataatgattgctcctggagcagatgattttgccgcgcctttgccaaagaaagtgaatgctaataaaacacctaatccaggccctgggtttgcctctaataaatatagaattgatttaccaaactcgcttacttgttccgtacctaatggagtcagaattccgtgattgatggcattattcaaaaataggattttggcaggttcaataaaaatatttgctaatggaatcagatgtgcattgacaatcactgcaacgcctgctgccattacttctgtcaatgtgtttacaacaggtccaatgacaacaaagcctaacagagccaaagcaaaacctagaagacccgcagaaaaattattgactagcatctcaaagcctgcccgcactttatcttgaaaaaattcatcgaacttcttaatcgtatatccgcctaatggccccataatcattgcacctaaaagcattgggatgtctgttcccacaatgacccccattgtagcgattgccccaacaactgcgccccgatctccagcaattactttcccgcccgtgtatccaatcagtatcggtattagataagtcagcatcggaccgaccattgaagcaaaggattcatttggcagatagccatctggaataaagagagccgttaacacgccccatgcaatcaatgcgccaatattgggcattaccatactcgacaatgtactacctagtttttggaccctcgactttaaagacgcattcctgtctgcttgtacttgttccatcttcattctcctcccaacttgtttttacaccttgattgtaggcgctttccgaaagcttcgaaagtcgtactttgtcacaggaaactgtgccaaaatttgtctcttatctacaaaaaaaagccatgcataatgcatgactaatcaataaatgcccttttctactcttctagcgatagtattttttggatttcctctattgtagcggcgtcgcttaatagttttacattttggatatctgaacaaaaaaaagcaatttcttgcaagcatgacaactgcttttctttgagaacaaccacaaacagaatcgtagtaacctttgattcttttgcatcgccaaaatcgacaccgtctggtacttgaacaagacaaatcccttcttcattaatccatttgtctgcctcttcttctccgtgaggcaaggctacaaagtttcctatataaacaccatattttttgtgtcgctgaattaaactgtttatatactgaggttgaaccattttttggtctactaagaatgtacctatctcatgcaatgcttcttctgcactttggaatcgctgatctaacaaaatatgtgttgctggaatatccactattttctcctccccattattgtttgatttcttcaatcaaaagcgtagcaagcaattgataaatgatggaaaaatttcctgaattaaatatttctgtattgagatcattcataatgatggaaccgctaatcctccctaagattttactgctttgctcatcgattggataaggagcgagcataactaacaagcgagttacgttaatctcttgtttatccatcgcataaagtgatagtccttgtgataaatcaaagattttgaaaactggttgcaaaatttctgtacttgacgcatgaaaaagggcaaagtgagtcttcggtattccaacaggggcttgtaaatagcgcttcactaatttattggctactttttttctgtcttgcactaacgctttggaaaaatgtttcatcacttcagataatgtttcttctaagttggggccattgtcaatcgtttgaagagtaaacaattctaataagcggttaatctcctcaataaatgctagaacatcttcataggtatcttccctagtagaaactggcgtaggtattgcatgagaaagtctctttttctgactaagcagacgaaattcttcttttagttcctgaatgtcttcttccaataaaataggagatactagcttatattttcctcgataacctggcaacaaagatgtggaaatcaccaagtcgtagttgccctcaattttatcctgttcgatatcccccacacggaaaaaagtaattttattgataaatggaaattgctttcttagctgcatctctaacaaactaattgaagccagtccgcttggtgatacacctgcaatattgacttccatcactttaggattcttttctaatgagtttgcgaagtgcaataccatataggcaatttcttctgttgaaaactgctgttgtgggaaaacaagcggtaagcttaaacggattgcttctgcaatttcctcatattgtttcattattttttctaaaattggattgtttagatggttctcttccaaaatcgctcgggtcattaccccagaaatatgtgttagcaacattttatataaaatttcatcttcaaaaaaatcaacctcagtgtgctggctaatcagttcgatcaaccgttttacctgatatgccaaagttgtatcaaaattctcttcaaaaaaatcgcggtcaaaagaattagaaaaatcccctaataaaatcgcaaaaaaaactatttcattaaccgaatacaaccgcttcgtttgttcagcaacttgagcaaaaatctgtttagctacctttagcaaatctttgttgatttgacttggataactttcttcctctactgagaatcctgttgctactcgctccatggctaaagcaagcataataccaataaaagccaacttgcgatcacttaactcaggatatttagattcaaccacttctcttataagatcttgcgctaaaatcaagtactgtttttcaataaactcaaataaaaaatgcgccgtttgttctgcttcaggaaaatgaaaaaactggtattcatttatttccatcatcaacgtattcgctgctactaaacgtcgatgtttttctggtcctttgagctcatatccttgattacggacaattgtcaacggaaggcgcgccaaactttcttctaattgtttaatatcagaaaaaaaagtagtattactgatttgatagagctctaaaaaacgatggctactaatcggcttagcagtagttgctaattgcagcaaaatcctatgttgtcgctctattgacgcaaactcttgggatggatcagacataattgcttcttgcagctgagtgatactattcccgacaatgactcgaaaatgtccacgaccttctttttctaaggatgcccctacagtacgcaacgaattctctaaattggctaattcgcggtagacagtccgcttacttactttcaaaagctgcatcattcggtccatagaaacaggaccgttactgttcattagctcagtcaacaaaatagtttcacgcttagtcaagaacataggcgactccttctgtcatcaattgacgatatttggaagttgtcactaaatcatcgacaactaagtgggtgacatttgttaatgcagccatttgctgaaaatctttttgaacgatatataatgcctctggattaaactgggttgtctcaatatcttctttctttacctcaataggtatggctaattcattggcaattttacgaacgattgcaacagccatcgtttgagcgcctcttttcttgccttcatacaaaaaaatcaatgttgggattttttccccaactttaaaagaaacatttgctaccgtttcttgctcttgctttaaaagtttaactagtgttttatactctgattccgctaaaaagttactcaagaagtaatgttgtgcttgaggtgtctttgtttgagctaaagcaccaagccctgattgggtaataactaaaagatcttctccatccttcaactgataaattgaattataatcgacaggtatggaaatggctgcttcttctaaatgtttagttaataaacttgccccaattgcgctagatcccatccccgcgtcgcatgcaacgataattctctttactttatccatacatattgttccttccgtacttttttcattcactgagtgataggtcaaaacaaaataggcaacaaaaaaagaaacaagcgtgcttaccaatactccagctaatacgcctgaccacatgtgatttggcgtatttgttaagatagccaaaatagaacctggtgaagccggtgatcgtaagccaactttactcaattgaaaaataaatgtaccagtagctccacctaaaatcggtgcgataatcaataatgggttcattaaaataaatgggaaataaacttcatgaatacctcctattgcttgcacaaatgcagcagcagtcgccccatttcttgcttttttagaaccatacctcatacatgcaaacaagacgcctaaaccaggaccaggattggcttcaagcagaaataaaatcgacgttccatgaatactggcgccttcaacacccaacggcgtaaatagaccatgattgataatattattaaaaaaaagaacctttagtggctccagaaaaagatgaatagcaggaaataaattctgcttgagaaaaaaatcaactaaatgataactttgttgactaagctgatcgagcaaagggccaaatacaaaaaagttacataaaaatagaagacctccaattaagcctgcagaaaaattacgaaagagcatctcatagccagtctttacttttcgagaaaagatatgatcaaagaatcgaagcataccacccgttagcggaccgataatcattgctccaaaaacttgtggaaattgagaggttaaaatcatccctaaaattgcaattgctcctgaaactccacctcttattggttcaaccatttttccgccagtgtaagcaagcaatattggtaagagaaaatgtaaaatagcttcttctgacttgatcaaccccccctgatccgcatgtagtacgggtacggcaaacgcaatgactgcccatgcaataaaaatacttacatttggcatcatcatatcagaaaaataatgagtatagagttttaaaaattgaattgtttgtcctctgtcttttattcccttcatcctcctcacctacctaacactagtataatttggttttctctaaaaaggaataaccatagattatgcttcctccttttgaatgtaccaaaaaagctgacgaaaaacgtcagctcaagttattgccttatttttaccattttttatttaattaacacgcacagcaaaacttggtgcgtaataagagtagctgctaactgaaacgctttgtccaatggtaggtgcatgaatgtattgtcccccaccaagtgcaatagccacgtggtgcgtacttccgcgcgatccccaaaataataggtcaccagcttttgcttcattgattgagataaccgtgccagaatactcttgatcataggtcacacgaggtaatgaaattcctacttttgcaaacacatattgagtaaaaccagaacaatcgaatccgttcggtgtcgttccgccccagacatatggtgtaccaagatatttcattgcttctgaaacaattgctgacccgtttacagattgtgaaggaacgtttgtattgttttctggtttattttcaggcttatttacaattgtttcttgttttggtgtatcattttctactgagtcacttgttccggtactgttagtactggaagattcatttgttgagcttgattcatttgagcttgactcatacgacgaagttgattcgcctgtttttgttgtactacttgtgcttgattcggcttgcgcagcttcttcacgttctcgagctgcttttgccgcttcttttgcggcagcaattcgtgcctgttcagcctgatagctttccttttgtttttctaggtcggctttttcatcttctttagatgattgttgcaaagcaagatctgcttgcaaaacattcaagtctgcttgcttcgattgaagtgctcctacttgtttctcaagttcaagttgatttgcttcaatttcttttagttttttatcattttcattttttttcgttttaaccgtttcttgatccgctttttgttgttgaaccaattcgttattagcactaacaatcgtcgtcatagcttgaacgcgaccgatagcatccgttaaagaatctgcttcaagaacggcatcgataaaattggtgctttgtccattcacttggacatctcttgcttgttcttgaatcgctttttcccgtttttcaatacgaacattcaagtcgtcgatttctttttgtaatttttctgaatcagcatgtaaagtagattgttgcgtcaataatgcttcagctttttcattgatagctgcaacatcattttccaatgctttgatttgtgcttgagcatcagcttgttgattttttaggttactgatttcttgatctttttgttcgattttgctatcaaagtcgtctgccgcgacaagtgttggtgctacaactgaagtaagcgcaatggaactcactaatattactgatagaatacgttttttcacccttcattcctccgcctgacttttcattgaaagtttaagttaattttaaaatatataagaatatctaaagtctttttacgataaagcgattgtaacatagatacatgtcaagcagataaaaagaatgttacaaacagatttcaaataatctaccagattcgatacaaaacataacaaaaaaatgaagctattcttctttgaatagcttcatgaatggaataactaaaataacaaataaaataatatttaatagcagtgtcggtgctaagaaacgagagacaaaaaatgaagtattgactgttgctattttaaataacaactgtatccccaaagttaccatttcaagacccgtaacgaaaataatcattccaaaaaacatggtgaatatgttttggtatagcgttttatttaaaatatacatgatccacacaatcatcgggaatgcgacagcataaataccaattatgccaatatagtaaagatcatacaagcatccaatgatcaatgcggttataatcaagtagtttttaggcaaatatctggcactacataggaaggcaatcaatagtaaatgtgcactcgctatataattatcttgcgtccagcgctcaagtaaacgggttaattgtccatctaacaacatcatcaagaaaaaaaatgctccggcaaagtactttaaatacgtattttttttcatgcctatttgtcacccgccaaacgtttgataatagtaactgcttgaatatcatacatttgtgcataaggttttacatatacttttgtatctaatccaaattcatctttggtggtactaacaactgtcccaacagcaaggtcggctggagaattccctcctaatcccgaggtttgtacaacatcgccttctttcaattgtgtacttccagtcaattgactgataaccaaggacttctctttttgatcataactacttagaattccaaaagtttcgccgtctttcccgctgattcgaacaggaaaatgatttgaattttgattttcagaagtcaacaattcgatttttgaagatgctgcattcacttcaatcacacgcccaatcaaacctttttgggacataaccgccatatttacttcgacaccatctttcgtgccacgatccacaacaagcatgtcttgccatgtatctggtgaacgattaataacattggcagtaattttttcatagttagtcaatgtttcgtttaactcaagctcttctttcaatgattcgatttctcgcttgtaattttcatttgatcgagcaatctcatcataactatcgattttctcttttaaacgttcgttttcttcatacgtgacaaaaagtttctttacagagtttgcaccggtttcgatccaccgtactggagctgtaatcaccttgtccacgataccaatcgtgtcgttgactgccgattgcacaaaactggatgaattcccaactgctcttctagcaatcgtcacactcaacacagaaacaactaaaatcacaataattaacgtgattatgatatttttattaggattaaactttttcacaaagacacctcaatgagttccaaactgatagccttaattttaccactaaaacgatgtaaacaaaagttaagttgtacgtcttaatgctttttttgtaattagctttctgaaattttcaaaaataaaaaaagagacttgactgtctcttaatctttgctttgaataacagcaataattcccgtttcaaatataaaggatgcttcatccgttatgaattcattactagcaaatgatgtaggatgttcaaccttcacattttccaataggtatttgctttccattaatgaaagattgtcaatgggagtcagacaacaatatgccagatatttcatgcccttttctttacgtatggaatacttacctggcaaaaagaaccgaatgacattttgcttatctaatagactaatattatgagcgaaaggctgaaaccgtttctccagtacaatccataaatttgctaaaaaatgatcgattcttccaccagttgcaccgataatatcaatctttgcattgggaaaatgctcaatagccatcaataatgcgagttgcgtatccgtatcgtctttttctgccggagcttgaaaaaaattttttgcattctgtcgcactcgttctctttcttcagaagaaagagagtcaaaatcaccaatcgcaaaatctaaaggcaaatcctcctcaagcagataaaatgatccccgatcaataccaatgtatttatcatacttctttagagacggccaagtttgctttttgccacctgcaactagaagaatattcatttattacaacacttctttcaatgctttgatttgatcagcaggactgtccgcgtcatagatgtagctaccagcaacaaacacattggcaccagcttctaaacagatccgagctgtttttggaacgattccaccatctacttcgatatcatagtgatacccatttttctctttcaattgtgctagttccttgattttagcaactgtttcttcgataaaagattgtccaccgaatccagggttcacagtcattaccaatacttgatcacacatggatagtacatgttgaatagcggctactggcgtaccagggttgataacaatttccgcctttacattttcatttaaaatcatttgaattgcgcgatgaatgtggggagtagcttcggcatgaactccaattatatcggcaccagcttcggcaaacgcatgaatataattttctggctgagtaatcatcaaatgaacatccagtggcaacttagttatcggacgaatagctttgacaacatttggtcctaaagtaatattaggaacaaattggccatccattacatctatatggatgtaatccgcgccgtttttttctacaagttcaatgtcccgttgcagattcgcaaaatccgcacttaaaattgatggtgctagtttaatcatattcgtttccctcacttatttttctttttataaattggacgacgattttcaatctcctctaaaaattgaacatagtttttataccgggtaagtgcaactgtttgctgttcaactgcttcttttacagcacaatttggctcatttaaatgcatacactcacgaaaacgacattggtgtgccaatgctaaaaattctggaaactgtttgggcaattgtccactatcgatttccaaaaaatcgattgagctgaatccaggggtatcagccactaacccatcatataatgtcaataattctacatgtcgcgttgtatgtttccctcgacctaatgactcagaaatttcggccgtttccaaatctagctctgggactattcggttaagcaatgtggattttcctgcgccagattgtcccataaaaactgtcagtcgttccgggaaaattctttgtaactccagaagatcgctattatctgcttttgaaacaatgacttggtaaccaatttgttggtacaaagcggcaattttttgaacctcactttgatcactcactaagtctgttttactcaaaaagataattggttcaatctctttatactccagtgtaactaaaaaccgatctaatagattaaatgagaaattaggctggatcaaacttgtcaccactacaccttgatccacattggccactggtggacgtatcaattcattttttctcggcagtatctctaacaagtatccatcagttggattactactttcaaaaataacttcatccccaacaagcggcgtgatttttctgtttctgaagtttcctcttgctcgagtttgaaagatagtatcttcagactctacataatagaatccactaagagctttgattatttgtcctttcaaaaattctcctcctcatttctttttattgtaacatatttataactcatgaataaatttctcaccaataaaaaaagcctgaagaagactcttcagacaaaaaaatcgggaagacaggattcgaacctgcgaccccttggtcccaaaccaagtgctctaccaagctgagctacttcccgataatagatattaaaaaaataaaaagactacgcgcccaagaggagtcgaacccctaaccttttgatccgtagtcaaacactctatccaattgagctatgggcgcatattaagaaatgccgaggaccggaatcgaaccggtacggtgatcactcaccgcaggattttaagtcctgtgcgtctgccagttccgccaccccggctgattgcgatggcaaaagcggaaaacggggttcgaacccgcgacccccaccttggcaaggtggtgctctaccactgagctatttccgcgtattcctgatgccggctaaaggacttgaaccctcgaccctctgattacaaatcagatgctctaccaactgagctaagccggcaatgaagtgcgggtgaagggacttgaacccccacgcccgaaggcgctagatcctaaatctagtgcgtctgccaattccgccacacccgcataggttattactatgagccgtacagggctcgaacctgtgaccctctgattaaaagtcagatgctctaccaactgagctaacggctcatatgggggttaacgggttcgaaccgctgaccctctgcttgtaaggcagatgctctcccagctgagctaaacccccataatttaaaaaaaacgcgtggcgacgtcctactctcacaaagggaaacccttcactacaatcggcgctaagaagcttaacttctgtgttcggcatggttacaggtgtatccttctcgctatcgccaccacactattcaattgagtaagtattgctcactcaaaactggatcgaagaatcaaaactcttccgagtttccttgcttttttcaatcgtggttaagtcctcgatcgattagtatcagtccgctccaaccatcactggccttccacttctgacctatctacctgatcatctctcagggatcttactttcttaaagaaatgggaaatctcatcttgaggtgggcttcacacttagatgctttcagcgtttatcccttccctacatagctacccagcgatgcctctggcgagacaactggtacaccagcggtaagtccatcccggtcctctcgtactaaggacagctcctctcaaatttccaacgcccgcgacggatagggaccgaactgtctcacgacgttctgaacccagctcgcgtgccgctttaatgggcgaacagcccaacccttgggaccgactacagccccaggatgcgacgagccgacatcgaggtgccaaacctccccgtcgatgtggactcttgggggagataagcctgttatccccagggtagcttttatccgttgagcgatggcccttccatgcggaaccaccggatcactaagcccgactttcgtccctgctcgagttgtagctctcgcagtcaagctcccttctgcctttacactcttcgaatgatttccaaccattctgagggaacctttgggcgcctccgttaccttttaggaggcgaccgccccagtcaaactgcccatctgacactgtctcccagcccgataagggctgcgggttagagtggccataacgcaagggtagtatcccaccattgcctccatcgaaactggcgtcccgatctctacggctcctacctatcctgtacatgcggtacagacactcaatatcaaactacagtaaagctccatggggtctttccgtcctgtcgcgggtaacctgcatcttcacaggtactaaaatttcaccgagtctctcgttgagacagtgcccaaatcgttacgcctttcgtgcgggtcggaacttacccgacaaggaatttcgctaccttaggaccgttatagttacggccgccgtttactggggcttcaattcgtaccttcgcttacgctaagcactcctcttaaccttccagcaccgggcaggcgtcagcccctatacgtcatctttcgattttgcagagacctgtgtttttgataaacagtcgcttgggcctattcactgcggctgctcgttagagcagcaccccttctcccgaagttacggggtcattttgccgagttccttaacgagagttctctcgctcaccttaggatgctctcctcgactacctgtgtcggtttgcggtacgggccattgttttctcactagaagcttttcttggcagtgtgacatcagaagcttcggtactattatttccctcctcatcacagcttgtccttgaaagtagaagcatttgactcccactaagactcactgcttgaacagacatatccatcagtctgcacttcttagcctcctgcgtccctccattgctcaaacaaaaacaacgggtacaggaatatcaacctgttgtccatcgcctacgcctgtcggcctcggcttaggtcccgactaaccctgggcggacgagccttccccaggaaaccttagtcatacggtggacaggattctcacctgtctttcgctactcataccggcattctcacttctaagcgctccagtagtcctcacgatctaccttcaacgcccttagaacgctctcctaccaatgcaccttatggtgcactccacagcttcggtaaactatttagccccggtacattttcggcgcagggtcactcgactagtgagctattacgcactctttaaatggtggctgcttctaagccaacatcctagttgtctgtgcaaccccacatccttttccacttaatagttatttggggaccttagctggtggtctgggctgtttccctttcgactatggatcttatcactcacagtctgactcccggatatgaatgaatggcattcggagtttatctgaattcggtaacccgagatgggcccctagtccaaacagtgctctacctccatcattctcaattccgaggctagccctaaagctatttcggagagaaccagctatctccaagttcgtttggaatttctccgctacccacacctcatccccgcacttttcaacgtacgtgggttcggtcctccagtgcgttttaccgcaccttcaacctggacatgggtagatcacatggtttcgggtctacgacaacatactcattcgccctattcagactcgctttcgctgcggctccgtctcttcaacttaacctcgcatgctatcgtaactcgccggttcattctacaaaaggcacgctatcacccattaacgggctctaacttgttgtaggcacacggtttcaggatctatttcactccccttccggggtgcttttcacctttccctcacggtactggttcactatcggtcactagggagtatttagccttgggagatggtcctcccggattccgacggaattcctcgtgttccgccgtactcaggatcctcctaggtgtgagccagatttcatctacggggtttttaccctctttgacatacttttccaagtatttcgactatctgtttcaactaccatatcggagtcctacaaccccaacaagcaagcttgttggtttgggcttttcccgtttcgctcgccgctactcagggaatcgaattttctttctcttcctgcaggtacttagatgtttcagttctctgcgtctacctcacagctgctatgtattcacaactgtgtaacatcctataaaagatgctgggttcccccattcggaaatctctggatcatagcttacttacagctccccaaagcatatcggtgttagtcccgtccttcatcggctcctagtgccaaggcatccaccgtgcgcccttattcacttaacctttgaccttacggtcggtgagtacttcttctagcgatagaaggttgctcaagaaaataagcgttgaacttattaaaaaactctttaacttgtccactcggtgtgtgttacttgttttgattttcttcgatatccagttttcaatgaacaaactattttgagagtaaacctctcaaaactgaacaaaggcaaacgatgtgtagtcttccgtactattccttagaaaggaggtgatccagccgcaccttccgatacggctaccttgttacgacttcaccccaatcatctatcccaccttaggcggctggctccaaaaaggttacctcaccgacttcgggtgttacaaactctcgtggtgtgacgggcggtgtgtacaaggcccgggaacgtattcaccgcggcgtgctgatccgcgattactagcgattccggcttcatgtaggcgagttgcagcctacaatccgaactgagagaagctttaagagattagcttagcctcgcgacttcgcaactcgttgtacttcccattgtagcacgtgtgtagcccaggtcataaggggcatgatgatttgacgtcatccccaccttcctccggtttgtcaccggcagtctcgctagagtgcccaactaaatgatggcaactaacaataagggttgcgctcgttgcgggacttaacccaacatctcacgacacgagctgacgacaaccatgcaccacctgtcactttgcccccgaaggggaagctctatctctagagtggtcaaaggatgtcaagacctggtaaggttcttcgcgttgcttcgaattaaaccacatgctccaccgcttgtgcgggcccccgtcaattcctttgagtttcaaccttgcggtcgtactccccaggcggagtgcttaatgcgtttgctgcagcactgaagggcggaaaccctccaacacttagcactcatcgtttacggcgtggactaccagggtatctaatcctgttcgctccccacgctttcgagcctcagcgtcagttacagaccagagagccgccttcgccactggtgttcctccatatatctacgcatttcaccgctacacatggaattccactctcctcttctgcactcaagtctcccagtttccaatgaccctccccggttgagccgggggctttcacatcagacttaagaaaccgcctgcgctcgctttacgcccaataaatccggacaacgcttgccacctacgtattaccgcggctgctggcacgtagttagccgtggctttctggttagataccgtcaagggatgaacgttctactctcatccttgttcttctctaacaacagagttttacgatccgaaaaccttcttcactcacgcggcgttgctcggtcagactttcgtccattgccgaagattccctactgctgcctcccgtaggagtctgggccgtgtctcagtcccagtgtggccgatcaccctctcaggtcggctatgcatcgtggccttggtgagccgttacctcaccaactagctaatgcaccgcgggtccatccatcagtgacgcaaaagcgcctttcaactttcttccatgcggaaaatagtgttatacggtattagcacctgtttccaagtgttatccccttctgatgggcaggttacccacgtgttactcacccgttcgccactctttttctttcggtggagcaagctccggtgaaagaaaaagcgttcgacttgcatgtattaggcacgccgccagcgttcgtcctgagccaggatcaaactctcataatgatttgtttgaacgatccataggatcgttaagctcaaataaaattaactttgctagctattgcttgcatgtattttgcttcatataatgaagcgccctacacattggttcgtttgcttgctttgttcagttttcaaaggtctactgcgctgcgttagcaacttttaaatcatatcagattaacaagcgaatgtcaactctttttttaaaagtttttttcgaaagtgtttattcaacaacttcctgtgcgtcatcagcgactccattagaataacaaatgaattgttatttgtcaacaacttttttcaatcttttttgttgctgtatcagcatcaaattgatttcttaaatttgcgacttcgttataatatcatctgttggttctggcgtcaacaacttttttcattttcttttagaaatgatttttgtcatttggcacatgtaataatatagcaactatcttgccattcgtcaacagtaaaatcattgatatttcaacgtttctaaatactgcggttccatcatatattttagttaattctatggaataatctctccatttggaaactatgatgattatttgaattctcaatgttcggtttttattcttgttgtaagtattatttcctatcattcttataaatttaagtatgattttatcaatttcctagaatatttgctaaaataggagaaaagaatattgttcctaggaggatttatatgaaaatacttgttgctgatgatgataaagagattgttgaactattaagtatctatcttcataatgaaggttatgaagccgtcaaagcttatgatggtaaagaagctttaacaaaaattagaactactccagatattgaattactgatattggatatcatgatgcctgaaatggatggcatgcaggttgtaaaagagttgcgaaaagaatcacaaattccaatcatcatgctaactgctaagactactgatatggataaaatacgaggtctagttgctggtgcagacgactatgtaacaaaaccattcaatcctttggaagtgatggctcgcgtcaagtctctgctccgtcgaacaaaaatgcaagctccctctaatcagccagatatcttagaagttagctcattgatcattaatcgtgattctcatgaagtaaaaacaatcaccggaaatgagatccaattgaccgctcttgaatttggtattctctacctattagcatcccatccgaatcgtgtatttagtgctgatgaaatttttgagcgtgtgtggaagcaagagagtgtcgtgtcagccaaaaccgtaatggtccatgtgagtcatctgcgtgataagatagaagaagcaactgatggcgagaaagtcattcaaacagtgtggggagttggctataaaatagatgcgaagtaatccaatagaaaaaaagaaacgtatcaccctcacttctaaagaaatcagtgaattatttgcagaaggaatcgttactgtaatccttttacttctattaaatgtcgcgattttagtcatcttgacttctataagagagaattcaccgttgttagtggaggcgatctatgagtcaaaaaacgcttttacttctgcttttgacacggatatttttcaaagtggccgcaatttcattatccctttgttctttttattagatgtgattgttttatattggcgtttgattcgtcgataccgtcaaatgcagctacggcatattattagtgagcttcattatattgcagagggaaactatgatcatcgtattccatttgaactgcgtggtgacctcaatcggattgtttcaaatattaacggcttggtagatagtaccgtcgccgccattgaagatgaacgaaggatcgaacagtcgaaggatgaattaattacaaatgttagtcacgatatccgaacccctttaacttctattattggttatctaggcctgattgaagatcgtcagtatcattctgaagaagagttattgaaatatactcataccgcttatgtcaaagcaaagcaaatgaaatctttagtagacgatcttttcgaatacacaaaagtaagacagcctagcgtcccaataaatgtcatttcttttgatatggcgcaattagtcgaacaactagctgcagattttgaattagaagcatctcgtaaaggaataaagattgagactcacactcgcccagagcacattattatggacggtgatactgagaagcttgtacgagttttcaataatttattgtctaatgctttaaagtatggaaaaggcgctgacaaaatcgtaatggaagtggaaaaagtaggaacagaagccattctaacagttaagaacaatggacaaatgattcccaaacattcattagactccttatttgaccgcttctatcgagtggaggaatcacgttcgcaggaaactggaggaactggacttggtcttgccattgctcaaagcatcgttgccttgcatggtggctacatttttgcaaaatctactccggattggacctcctttattatccatctcccattaaagagaaatgatttatcaaatacccaaaactatggttgacgaactaacgctttttcgctattctagagaaaatacttactaataaagcatagaacctagtacattttttactttttcagagaactgatggttggtgagaatcagtaatggaaagaatggaatccagttcattaaaagtgtatcttttgaaagaaagatcgtgtgcccacgttacgggcaacaagggcagcgttatgctgaactcgggtggtaccgcgaaagatcttttcgtcccaagaatagggatgaaaaggtctttttttatatgaaaaacaagggggaagaattatgttagatattaaaatgattcggcaaaattttgacaaagtccaaacaaaattacagactcgcggagtaaaaaaagaagtattagaagaattcttaaagttagatgaaaggagacgacaactcctagtagagacagaagaattaaaaaaagttcgaaatgaagtttctgcagaaatagctcaactaaaacgagcaaaaaaagcagcagatgataaaattactgagatgaaagaagtcggtactaaaatcaagtctcttgatgacgagattgcaaaaattgattcagaaatcaaattgatcgcaacgacattacctaatctgcctcatgactctgtcccagttggaaaagatgaagatgacaatgttgaagtaagacgctgggctacaccaaaagaatttgatttcgaagcaaagcctcattgggatattgccgaaaacctaggaatattagattttgaacgaggtgcaaaggtagccggtagccggtttgtctactataaaggattaggtgcccgtcttgaacgagctttatataactttatgctagaccaacatgtttatgaacatgggtacactgagatgattactccatatattgttaatagcgatgcaatgtttggaactggacagtttcctaaattcaaagaagatgttttccaattagcggaaacagatcttaccttgattcctactgctgaggttcctttaacgaattattataatggagaaatattggatcttgaccaactaccggtttacttcacagcattaagtccttctttccgctcagaagctggaagtgctggtcgtgatactcgcggattaattcgattacatcaattcaacaaagttgaaatggtcaaactaagtgaagcagcacactcttatgaagaattagaaaaaatgactgcaaatgcagaagacattttacaaaaattacaacttccttatcgagtaatggcattgtctacaggtgacatgggcttctctgctgctaaaacgtatgatttggaagtatggattccagcacaagaaacatatcgagaaatcagttcatgttctaattgtgaagattttcaagcacgtcgagcaatgatccgttatagagataacgatggcaagattcattacatgcatacattaaatggttcaggactagcagtcggtagaactgttgctgccgtattagaaaactatcaaaatgaagatggtagtgtgactataccagaagtactagttccttatatgggtggagttacccgaattgaaaaaaattgaagaacaaggtaggatgagaattcctaccttttttctttaaatattctaagaaatacccccctattgttgaaactatattacagttatgttacgtttattttactttatgatgataaatggagggataaagtcatatgtctgacaaaaatacctatgcacgtcgtagccaacgtcacaaacaagaacctgatacctgtgaaaatacaaatcaattgaatgaagctgtaaagcccaaaaccggaaacgaaaacaaacaacaaaaaataccgaagaaaaaatctaattatagcaagtatatattcgcattgtttaccgcacttattctagtaattgtcgctactggcggctatattgtttatacattaaaacagcaagaagcagaagctcaagccaaatatgaaactgctgcaaaaaatctcatggcttcaatccaagaagagcaagaccaaagtggaatttcaacgaaaatagatactataaatgacggagaaaataagtgccttgtttaccgtccagttgatgaaaatactgttcctttcaaaaatgcaaaccagctcttagacgagcttgctcaaaagcaacaaaaaaagcatcgtgaaaaagaagtgcttacagttgccagaataaaagcaacagcaatatcttctaaaattggtcagtatagaattgaagcagatagttttatctgggatcgcagtaaggaaaattttaaaaagccagacagtatttctgagaaagccatttatgtttccgaaaaaactggcaaagaaatcacaaataaggatttgattccagatgaaggaagtctcttaggtattcaacaggtgattcagcaatccatacttgatcaagccaaagaacctgaaaaaatcattgatgctgtattaacaatggatagaatttcttatgatagtaaaatgacttatacacctgatgaattgactatcgtcttaccaaaaaattcaactggaacttctaaagtcactctaaaatacaaagatattgctccattcattgatacagatctggtttcgcaagaaagtataaaagatacattacctgcattagatgaaaataaaaagtacgtcgctcttacttttgatgatggtccaaataatagctcaacacttgatttgttgaatatactaaaaacagataacgtgaaagctacttttttcatgttaggacagatggtggatcaaaatccagatgttgcaaaacaagtccacgacgagggtcatgaggtagcaagtcactcgtattctcatccacaattgaatacactttcgacagatgaattacaaagggaaataaataaaaccaacaaagctattttcaaggctacaggcgtcttgcctcgcaatatccgtcccccttatggcgctattgataaaaaaagtgctgaaacaattggcatgccaattattcaatgggatattgactcacaggattggaaatcaaaaaatcctggaacaatcaataatgttgttaaacagaatgtctttaatggcgcaatcatcttaatccacgatatccatcctgaatcagtcaaagctgtaccaggattgatctctatgttaaaacatgaaggatacgaatttgtgacgatcgatcaactattgtcaggaaaacaaaaaccattgcatcaatattttggtatgaatgatgaacgactagtagaataaaagaaaagcgaacgtattggcgttcgcttttcttttattcataaacatttgtagtaaatatttgaataagtaaatgagaaactgctttaggctgcatctcagaaaaatcttttagccagcgttcaatcaacccgatcgagccacagacaaaataactcaaacataactctaattcttctcttgttgcgtcttcgaaataaatagtaaagcgtttaaacgtttccggtctgattttttccaataacaaatctaataaatgactgttattaagcagaatcaaatgacttacactaggattttcttgcagtataagtaataatttttctagccatagatctaatgggagattttcttgttgcaaattatctgcaatttgttcaacgatttctttctcaatctcctctaaaaggtctgcagtatctttgtaatacttataaaaagttcctcgattgatatcagcacgctgggcaatctctgtaattgtgattttttcaaattcttttcccatcaaaatctcttgaaatgcttttcgaatcactttttttgtatattgtgttcggcgatttccaactattcctaccataacttcaatcctttctatacaaaaataacttaaatgtttatttaataacagatgaataagatttgaggattgcccctttttttctttcttagtatactaacgctatgtgattaaatcaacaggtgttcaaaatatggaggcgttatatgagttatgtagaagtaaaaaatacgtataaaagatataaaatgggcgaaaccacgattaccgctaatgaagacctatccttttcaattgaagaaggagaactagtcgttattttaggtccaagcggagctggaaaatcgactattctaaatatattaggtgggatggattcacctgatgaaggtcaaatcattatcgataatattgatattgcacaattttcggataaacaacttacagaatatcggcgcaaagatgtaggcttcgtttttcaattttataatttagtcccaaatctaacagcaaaagaaaatatcgagttagcaacagagatatcaccgaacgcacttgacccagatgctgtgcttaagcaagtaggattagaaaataggtccaataactttccttctcaattatcaggtggcgaacagcaacgagtgtccattgcccgagcgctagcaaaaaatccgaaattacttctttgtgacgaaccaacaggagcattagattttgaaaccggtaaacaagtattgaagctgttgcaaagcgcaagtcgtcaagctggaaatactgttttaatcattacgcacaacagtgccattgctcccattgctgatcgcgtgattcgtattaatgatgctacagtgcgctctgtagaaattaatgaatcccctatttcaatcgatgagatcgtttggtaggaggaaacaaatgaaaaataagacgtatttaaaagcaagcttacgagaaatcaaacagtctaaaggaagatttatcgctattgttttaatcatctttctaggtacttttttgtatgtaggtgtcaaagcaactgggcctattttgaatcattctgcaagtacttatgttgatgaacataacttagctgatatacaggttacatcaacactaggtatcaccgatcaagatcttaaagtagctaaagagtcagggattcaagtggaatcaggctaccaattttattatgtagcagaagcagatgaagttgtccaaatcaattcttacaacaaaagccaaaaacaaaacgcattaatccttgaagaaggccatttaccaaagaatagcaatgaaattgtcttagatacacaagcgaaagaatatggctatcagttaaacgatacttatactatcgactcgcaggatactataaaggataaaaacttcaaaatcgttggttttgccaactcgcccctatttatcagtaaagctgaacgaggctatgcgaatgttggcagtggtacagtaacatattttgcttaccttcccgaaaatcaatttctgagtgatgtccaatcggtgctctatctgtcttttgataatgtgaaagatttagaaacttactctgattcctatcaagaaaaaatggaaaagaatcaagaaaaagtagaaacgctttttgctgatcgtccacaagaacgtgtagcagaaatcaaacatgacgcaatggaagaattgaaacctgctaaggaaaaaattgaaactggaaaagcacagctattagatgcacaaacagaattagatgctgctaaagctcagattgaacaacaaaaaagtgcaacccttctgttaccgtctcaacaacaagctggtgctattgaacaactgaaaactgctgaatcgacattgattaaacaacaaaatcaaatcaatgaagaaaaagagaagttagctgatgcagaatctacattacaaaaaaaagaaaatgaaataaatgaaatggaagagcctacttatttatttaatctaagaaaagataatcctgggtttcaagaatacggcggtttatctgatcgtatagcggcaattgcaaatgtctttccagtattcttcttttttgtagcagctttaataacttttaccaccatgactagaatggtagaagaaaatcgaaaagaaattggcacattaaaggctttgggatatgcaaaaagagagatagctcgaaaatatatcatctatgctcttttatcatctagtataggaattctcttaggagctgtactaggtatcgaatttctacctcgattaatctattttctttctagtgaacggtatcttttaggtggtgtccgggtttactatgtttgggggccaatcattcaagctacagtcgcctttattcttgctactttaggtgcagcccttgttgtcctctatcgtgatttgcgagaaaaaccagcgcaactattgcaggcacgtgcaccaaagccagggaaaagaatttttctagaatacattcaaccactttggtcacgcttgagctttaatcaaaaaatcagttaccgaaacatttttcgctataaatcacgaatgattatggcaataattgggatcgcaggatgtgcaggacttatggtcgctggagtgggtctaaaagattcattaagtgctgtttcgcaaaaacaatttggtcctatcactgattatcaagcaatcgtcacattaaaagatagtaaaacaaacaataccgaagtttttgaaatattagaagaagatccaacaattcaacaatccctgcttgtattgaatgaaacaattgagttacggtccaaagaacaaggaaagcaaagtctgtctttagtggtaccttctgatactgactcattctcgaactatatgcatctacactctaccgatggaaaaaaaatgtcactagatgatggggccatcctaacgatgaaatatgcggagctttttgatatccacattggagatgagctaaccttttatgataaggatcaaacagctgtaacagtgaagatagctggtatcgctgaaaattatttaggtaactcactttatctttctagaaatgactatgaaaaagcaacaaatacgaactatcagcctacatcgcttcttatcaagagtaaaaagatggaacaaaagcaagaagacgcattagctaaagaactattgaaaacagaccaagttcagaatactaccttcctgtctagtcaaatcaaagcgcaaaatgagtccatggggaatctgaattccattgttcttatcttggtcattttatctggtgccttggcatttgttgttctatacaatttaacaaacattaatgtatcggaaaggattcgggaactctctacaattaaagttttaggtttttacgacaaagaagttacaatgtatattgttcgtgagaatgttgtctttactttgctagggatcctagctggttatggagtcggatacttactgactgattttattctccgacaggcatcgatggaaaacatggtttttccattagtgattagttgggctgcttatgcgttagccggcggcatgaccattttatttacaatcattgttatgttggttactcattataaattgaagcatgttgatatgatcgacgcattgaaatcaaatgaataattttcccatacaaaaaatggcggtcagtgtcttattaagactactggccgccattttttatttaatgttttcacgtgaaacaatttctaagacttcacagaatagtttggtgcttctttagtaatttgcacatcgtgagggtgagattctttcaaaccatttccgctcatttggataaactgtgcttcatctcttagttgttttaagttcgctgctccaacatatcccatccctgattttagaccgccgatcatttggaataaaatatctgcaacactgcctttataagccactcggccttcaattccttctggaacaagtttatttgcttcattaactccaccttggaaataacgatcacttgaacctttttccatagctcctagtgaccccattccccgataggttttgaaacgtcgaccttgataaatttcaaattcccctggagattcatccgttcctgccaacatacttcctagcataactgcatgtccgccagcagccaaagctttgacaatatcaccagaatatttgataccaccatctgcaataatggcttttccatattgtcgagccactgaggcagcatcataaatagccgttaactgagggacacctacaccagcgacaacacgtgtcgtacagatggaaccaggaccaataccaactttaacgacatctacaccagcgtcgtatagagcttttgttccctcagcagttgcgacattccctgcaattaatgttgcttcaggaaaatgtgctctgatttcagaaattttacgcagtacgcctgcactatgtccatgagcagtatcgattacgatcgcatctgctccagcatctaacaatgcttgtgctctttcaaaggtatcactggtcacacctacagctgccgctactaataaacggccatgagtgtctttagccgcgttggggaattcaatgactttttcaatatctttgatcgtaatcaatccacttaaaataccttcatcatcaacgatcggtaatttttcgatcttatgtttttgcaagattttctctgcatctttcaaagaagtaccaaccggtgccgtaactaatttttctttggtcattacatcagaaattgcgattgaataatccgtaacaaaacgcatatctcgattcgtgatgattccaactagtttacgattctccattgtttcaacaatagggacaccgctgattcggtatttactcataaggtgttctgcatctgctactagatgactaggtgttaagaagaacggatcaatgattacgccactttcagaacgttttactttccgcacttcatctgcttgggcagcaatactcatatttttatgaatgacccctaatccaccttgacgagccattgatattgccattttactatcagttactgtatccatactggcactcatgatcggtatatttaacgtaatattttttgcaagctgcacatgcatatccacatcatttggcaacacatgactttctgcaggtatcaataatacatcatcaaacgttaaccctttttttacaaatttggtttcccagttggacatttttgtaaccactccttaaagttaatatgtatttttaaaaaaatagcaaatattttttcataagtcaactattcggaaagctttcttatttattcctgtgtaatctgagaaaacagccagaatcacaaaagatttctattttctccctcttgtatgacacataataaaaaagacccacacgcatgaatgacatgtgggaacttattattatcctctaggaacagataagctactaataatattgtatttcttcttcaagtaatatttagctgctagtgccacagccccaatcacaatttcgattaatgggtcgacctgtggattaagtggtggttgaagcatagcagaaagtgagatagtcacgatccatactaagaaagctccaactaaaatcaaaataattttccacattttcggacgtttacttttatctgcgcctggacgttcatattgatacatgtacttgtacattaagtagaagacccaaccagctaacatggccattaagaagagggtcaacaatccgtaaggctgtgcttgaccttttgtaaatacccccatcacgccgagcattaatccaaaaatacctaaaataagcaacgtattgtctaaccacatcaagaatggacctgattctttttgttcaactggcttcgtgatgattgcttccgtacgttcagagactgtcccaaaaagttgtctagcggttttaccacctttttgttcttgaacaagaatcggtaacatctcatgtaatgcgacagttttttcttcttcagaaagattagctgcctccaaagatttttttaaatcaaaaatatattgttggttacgttttgttagttgtttttctaattcacgattttcggaaacatacgagcgcagagtttctggttccataaatcatttctcccttctgcgtgatttcttcacaaaggacattttaccatatttttttttggaagaaagccttttatacattaaaacggaataacataacatcgccgtcttgaacgacgtattcttttccttctaaacgaacacgcccagcttcttttgctgcatgcatattgccatacttatccaaatcttcaaaggaaacagtttctgcacggataaaccctcgctcgaaatctgtatgaataattcctgcagcttgaggcgctttgattccttttcggaaagtccatgcacgaacctcttgttccccagctgtaaagtaagtggctaatcctaataaatcataggccgcacgaatcagttgatctaaaccagattcttcaatgcctaaagcttccaaaaattctgctttatcttcatcatccaattcagcgatttcttcttctgctcgagcactaatgacgatcacttccgcatgttcactctcggcaaattctttcacacttttaatatagggattctcttctgcatttgccacatcatcttctgcaacgtttgctacatatagaacaggttttgttgtcagcaaaaacaatcctctaacgattttttgttcttcttcagtaaattcaatagaacgtgcggatagaccttcttctaaaacaggtttaattttatctaaaactgctaattcagctacagcatctttatcttttgttttcgcaactttagcaacacgtgcataacgtttattgatagattctaaatcagccaagactaattctaaattaatagtatcgatatccgctagtggatctacccgtccttcaacgtgtgtaatattgtcatcatcaaaacaacggactacatgacaaatagcatctacctgacggatatgacttagaaattgatttcctagtccttctcctttactagctccgcgaacgattcctgcgatatccgtaaattcaaatgttgtcggtacagttttttttggatgtactaattccgtcaaacgttgtaaacgccaatcagggacttccaccatccctacatttggatcgatcgtagcaaaaggatagtttgctgcttccgctccagctttcgttatagcattaaataaagtagatttacctacattaggtagtccaacgattccagcagttaaagccatttattatttcactctttctcttttttttctaggatttttttcatttttttgtcgaactcacggcgagtaagcataacaatatggccacagttcgtacattttattttgatgtccgcacccatacggataatttcccaacggtttgctttacatgcatggggtttcttcatttcaacaatgtcaccaagatcatacatatttatcacctcaagcttcatcaaattgaatgttcaataaatcaaggattcgtgttaaatctttctgtgaaaggtactcaatctctattttccccttaccttccttttcatggatttcaacatttgtcccaaacttgtccattagtcgttcttcactttcccgcaaataatagggtttttcacgaatcaaacgaggaattttcttcttctcatttttagcatcattcatttcagacactaattgttctaattggcgaacagtaagattttctttcacacatcgattggctaattttaaaatcagatctttgttttttaaccctagcagtgtgcgcgcctgtcccattgataagcgttcatcttgtaccatctcttttaccaactttggcaatgataatagacgaagataatttgcaatataaggacgacttttgcctaatcgtgttgccacttctgcttgtgttaatttaagatttttcatcagcatttcatacgcttcagcttcttctaaaggatttaaatcttctctttgcagattctctagaacagctacttgcatcattgcttcttcatcaaaatcacggataattgcaggtatcgtttctttttttgctaacttggatgcacgaaaacgtcgttcaccagcaatgatttcatagccctttacagtagattttctaacaataatcggctgaaaaacacctgcgtgttgaattgaattagctagttcttgaagtgagacttcatcgaaggttttacgtggctggtaagggtttggtcttaattcatttaaagggagctcaaccacttcctctgttttgatatctacttcttctaagccttgaagatcttgaaatagtgcatcgatcccccgtcctaaacctttccctttatttttcacgagtcaacacttcctttgctaatgtctgatatacttcagcaccctttgaacgtggatcataatcaataatagatagaccatgacttggggcttctgataagcgtacattacgtggaataattgtctcataaactttttcttggaaataacgacgaacttcttctactacttcagcacctagatttgtccgtgcatcgtacattgtcaacaaaacaccttcaatttctaattcaggattaaagtgcttttgaactagacgcacggtattcaataactgacttagtccttccaatgcgtaatattcacattgaacgggtattaaaatagagtcgctggctgtaaatgcgttgatcgtcaaatgtccaagagagggggggcaatcaataaatatatagtcatattgatctttgatttcattcaatgccgatttcaaacgagattcccgagccatcattgaagttaattcaatttcagcaccagctaattgaatcgtcgcaggaacaatatctaaattctcacgactacttggcaatattgcctctacgattggtgtttcattcaccaatacatcgtagatatctttatcaacatctggtttacgaattcctactccacttgtggcgtttccttgagcatcaatatctactagtaagactttttttcctacataagccaaacaagcacccaggttgactgtagttgttgttttgcctacgccgcctttttgatttgccaccgaaataatacgtgccattctgcttcctcctacttgattggttgtttcgccggcaaaccaggtttgcgcgggtatttttttggcgtttctttcgtttttttgatgatcaaaagatgccgttcatcattactaacaggcaatgtcaattttttttcttcaataaacttaccaccaagtaatgcgattgctgattttgcttctattaattcttcttcgctttttgctgcttttaaggcaaagaaatacccgttctttttaacgagaggcaagcatagttccgttaaaatatttaaacgagctactgctcgagcagtgacataatcaaaggattctcggaactctttttgaccaaatgtttctgctcgatcgtgaaacaagtaaacatcttttaaacctaaatctgccactaaagtttgtagaaaagtaatccgtttattcagtgaatcaacgattgttatctttagttgtgggaagatgattttcaatggaatactaggaaaacctgctccagaaccgacatcacataaatgtgcatcttctttgaatgctgtcacaaaagctaaagaaatcgaatcataaaagtgtttcaaatatacttctttttgatcggtaattgcagtgaggttcattttttgattccattcaatcaaccgatcatagtaagtagcaaattgcttgagctgttcagatgacaactcaattccttgaatagataattgtttttgaaattcttctggcagcataatgaatcctttctatttttgtgaaacagaaaaatgtttcacagactaattcctactttaacgcaaaaagttttgagatgcaataggaatacattgctttcaaagagattttaatttttcctcgacggtttttatttaattgtttgtggttagtttatggcaaaaatttgaacttgtactcagacaaaaaaatgcatcattttccatgaccggtaaatactaactcactagacttaaaaaatacaattacaaaattgtatctgtattctgatgaaattgttacttgtatgaatagtcagtaagcagctgtaaaagtgtattatcagttctatcaattttttagttaaataatatagaaagaatctgtttttcaaaaaaattgatcgataaaataagagctacccttcaacatgaaggatagctcttattttttctattattaattaatgaacgcgaggttcattattttcttgcatacgatcagatgttcgttctactgcacctttagctttttctgtttgtcgagaagcaaaatctcctgtttttgatgccgcgttggagactttatcttgaactgtctcgctatcttcttgatactcagcttctgacttaatgtcgaccacattgatattgacttcaattacatctagttgagtcatattggctacttctctatgaatcacttctttaactctctccgcaacttctggaatatttcgtccgtactctaccacaatatccatatcaacagcgacttgttttttgccaacttcagtattgatcccagaggttacattatctgtatttactaatttctctgcaatatttgagaaaaaccctccatcaactgttaacagaccatcaacatcttccagagcgataccaataattttttgaataactttatcatcataggtcaaagaaccatttacggatgtttctccagtaggaccttgaaatccactaggtttttctgtctgattatgatgttggtttccaactgttgcttggtgctgttcaaccgcttcttgcgcatgaggtacaactgggtctggtgcttctgtcatcggaatatcgttttcttttgtcgtatgatccgtgtttggtacgactggatctggatgtgcacttactggtttttcattttttaattcgtttttttcgttattcatttaaattcctcctgagttcttattgttttagaaattgatctaacattcccgttctctgtacgtacatccctagggcaaagcctaatcctgtgagcataatgatcagtagtgttttgaaaaagccaatgctgacaaatagtaaagctaacactaatccaatcgctccaaagataatagggatcttatattgttcaagctctttcattgatagacctcctattctacacgtggattttctgtagtgttctgttcttcgtagttcgtataagaaacatcgactttgactttttcacttgatcctaacgttctctgcaaatcttgctggatctcagtcatcaaattctctgttttacctaccaatgcagaagtacgttttaatcttcctttgatttttacgctgattcgatttttagttgctttaacattcactttaggtccatcaacaaattctttttcactaacctttgttcgtactaaaccttcaattgcttttttatcaatcgacaatgttcctttatcctctttcaaaacaaaagtagcttttgttctaggatagaagataataactagaatgacacaaaggaaaaagataattagaactgctgctgcccaaaaaagatattgttgtaggaaataattcgtgaaaaagaaggaaataaatctttcttttcgatctaagccaaacggtaaactaaaataaggattgcccaataataatattggcaataacacagtaataaaaatcaatgaaactacaatcgctaaagttttccatcctttattcataagacacctcctaatatttgatcacttcttatagattgattgcttctccaccagttactccataaatttgagctgttacatagcttgctttgttcgacgccagaaaaacatacacaggtgctaactcggctggttgtcctgcacgttgtaacaacgaattttggccaaattcaggtaactgatcctgaggttgtccatgatccaactgtagaggtgtccaaattgggcctggtgctacaccgtttactctaattcccttttcagcaaactgttttgccaaactaactgtgaaactagcaatagcagccttagttgcagcataatccattaaatgagcacttggactaaaagcttgaacagaagtcgttgtcacaatggccccacctgctgggagatgaggttctgcagctttaactaaagcaaacatggataatatattcaccatgaacgtatcttttacttgctcaaagggtaattctgaaatagagggacgtgtgatttgttgcgcagcgttcaaaacaagcgtatccaaaccgcctagcccttttactgctttttcaacgatttcttgaggagctgcttcatctctcagatcatatggtaataggatagctttacgtccagcatgttcgatatagtgagcaacttcctcggcatctttttcttctcctggaaaaaaatgtaaggcgatatcggccccttctcgtgcaaaagcaatggctgccgctcgaccaattcctgaatctccacccgtaatcagtacccgtcgattttctaattgatttgttccttcatatgtttcttctccacaatccggctcaggcatcatttcttcttgcaaagcaggagtatcttgatcctgttttttaaatttacctgtttgataaagttcgcgcggatcattcaaaataggttcactcatcttacatcctccttttgtctataacaaaattctaaaccattaaatttttttttggaaatataacgcttatttaattttaaaatcaaaaataatttcaataaaaaatgagcaaagaaagcgtacacaaagagggttttaataaggatatagaaggtaaaataatttatttctctttccgtactgaaattcaattttttccatattttggcaaaagtaggtaaactaaaagaaaaaagggggagtacaaaatgccttggaatatgaaagattatcctgcttcaatgaaaaacttggatccgttggttcgaaaaaaagcaattgatattgcaaatgctttgttgaatgatggctatacagacgatcgggcaattcctattgctactagccaagcggaaaaatggctagaaaatgccagtgaagaagaaaagaaagaatttcgtaaggaaaaaaatcctcaaaaagatgatccgcataccaaaaataaaaatgcaaaaaaacttctgacagccaatgttcaagtaaaatttgaagaagataaatggattgttttatctgaaggcgctaaacgagctagtgatcattttaatattaaagaagatgccattgctcgggcaaaagaaatcgctgaaaataaaaaaactggtgtagaagtatttaaaaaagacggtagtcaccaaaaagattacgacttttccgaataaaaaaaccagcctctttaggctggttctgttattttcgcaatctttccttgttcgatgtagaccatcaatatacttatgtcggctggatttacgccactaattcggctggcctgagcgatggtttctggttgtattttttgtagtttttgttttgcttcagttgcaagaccattgattgcttcataatcaatgttttcaggaatccgttttgcttccatgcgttttagtttttctactttttcaagggcttttttgatatatccttcatatttgatctgaatctctacttgctcaatttccttcggctttaatgcagggtttgcttcgataaactgcaagagttcttgataatttacttctggacggcgtagaaattcatttgctagaacaccatcttttaatggagcggttcctttctctttgaggaaagtttgaacagatggtgttggtttgatacgtactttttttagacgttggatttcctcttctacagctgttttttttgttagataggcttggtattgtggctcttccactaagccaatttggtgtccgacttctgttagacgaagatccgcattatcgtgacgcagcaacaaccgatattctgctctcgatgtcaatagacggtatggctcattagtcccttttgttactagatcatcgatcattactccgatgtatccatcactacgtttcataataaaaggctcttttccttgaatcttaagagcagcatttatgccagcaatcaatccttgacccgctgcttcttcatatccgctcgttccatttgtttgtcctgctgtaaaaaggttagcgatgacttttgtttctaacgttggtcgtaactgatgtggtactacaacatcatattcaatagcataacccgtacgcatcatctcaactttttcaagcccggcaatcgaatggagcatattgacttggacgtcttctggaagagaagttgaaagtccttggacatacacttcttcggtatctaaaccttctggctctaaaaataattggtggcgtgatttatcggcaaaacgtacgattttgtcctcgatcgaagggcagtaccttgctccaaccccttcaacgattccagtaaacattggtgcacgatgaatattatcattaatgatttgatgtgtatgttcattggtataggttaaccagcaaggttcttgattggttttgtattggctatctggtgtactgtaactaaagtgattaggggcttcgtcaccgggttggatctcagttacatcatagttgatggtacttgacttcacacgtggcggcgtaccagttttgaagcgcgcaatttctaaacctaactcttttaaatgatcagcaagtccaatggatggttgagaattattaggtcccgaagaatattttagttcaccaataataatttccccacgtagcgcagttccagcagtaatgatcaccgattttgcttggtaacgagctccagttgcagtaacaacgcctttacaaataccatcctcaacaatcaatttctctacaataccctggcgtaatgtcaaattttgctccatttcaatggtttttttcatttcagaagcataggcatgtttatctgcttgtgcacgcaatgcacgcacagccggtcctttacctgtattcaacattctcatttgaatgtatgttttgtcgatgttcttccccatctcgcccccgagagcatcaatctctctaacaactacacctttagcaggacctcctactgatggattacaaggcataaatgcaaccatatctaaattgatggttaacaataatgttttacaccccatacggctagctgcaagagcagcctctgatccagcatgacctgcaccaactactatgacttcatattcttctgcttgatattcttgcatcgtattctcctttggtaattttattttcctaaacaaaattgactaaataactgcgtaattaattcatcttgaacactatctccaacaatttcgcctaaataatcccagcaacgagtcatgtcgatttgcacaagatcaacaggcatcccactttcaattccttgaatcacttctgctaatgaatgttctgctttttccaataatgcaatatgacgagtgtttgagagataagaagcatctttgtctcctgtatttccaccaaaaaacaagtcagctattgcttgttcaagttgatccaatccttcactcgttaataccgaaataggaagagcaggctcattctctaaatagggcactaaatcttcttgattgattcttgaaggtaaatctgttttatttagcaaaatgattcgtttatttccagatgtaatatccaataattgtttatcttctgtcgtgagtgactcactttgatttagtactaataaaatcaaatccgcttcactgagtgctttgcgactacgttcaacaccaattttctcaacgatatcttctgtttcacgaattcctgcggtatcaactaactttaaaggcacaccacgtacgtttacatactcttcaataacatctctagtagtacctgcaatatctgttacaattgctttctcttcccgtaataagtgatttagcagacttgacttgcctacgtttggccgaccaataattgctgtactgagaccttctcgtaaaatttttccttgctgtgctgtctgtaaaagagcttgtatctgtttctggacttgatttgccttttctaataataaacgtgttgtcaattcttcgacatcatcatattctggataatcgatatttacttctacctgtgccaatgtctctaagatctcttgccgtagttgtcggatcaatcttgagaggttaccatctaattggttgatagcgagattcattgctttatcagtttttgcacgaatcaaatccatcactgcttcagcttgagataaatcaacacgcccattaagaaaagcacgctttgtaaactctcccggttcagccaaccgtgctccttgacgcaaaactaattgcaaaatttgattaacgacaacaatcccgccgtgacaattgatttctactatatcttctctagtaaaagtttttggttttctcatgatcgataccataacttcatccatcatttgatacttctcagggtcaaaaatatggccataatgtatcgtgtggctactcacatctattagttttttctttcctgattgaaagacagcatctgctatggaaattgcttgttcaccacttaatcgaacaatactgatcgctccttcaccagggggcgtagatattgctgcaatcgtatcaaattcctgcgtaatactcaccatactaaagctcctcctaatttttcgcataaaaaaagcgcccactccacccgtcaaactcataacggatagacttagcactttgactgcttgtcatataaaattctgggaatagattagcatactttttattttgtcgcaagtctacttggtaaacttttaatcttttgcatcaaacactaaaaacatttaaaataaaggaaacaataagaaatgagggatttttatggatacgtccaaaaaaatagatacttcttctcgcatcaaggaaatcattctttctaccggaaatgtcaatcggccatacattgttcgcgatattgtctttgccgcagataaaattgaagtagatttatttgatcctgaaatcgatttgaatgcgcttctctctgatgttgcttttcgtctgaaagaaaaagcgcacagttatggtgctaatgctgtaatcaactgccattttgaacatgatcggatcgtagaaaacgggaaaacttttttagaaatttttgcttatggaacagttgtacagtttacacaatctacaatcggcggctaatttccctcaacaataaactgctaaacctcgatactaccaatacaattaatataaaaaaagagtccgtggcaaacggactctttttttcaccaaagtaagaactactcatcgtatgtttactttgataagaatgatttctagtcaagaatacttggtttcaaatatcttgtcaattcctttagacttaaaagttttttttcgctggttcaaccaccaagtaccgataaggctcgtcaccttcagagtgtgtttgtatttgggcatccttacttaatgcagaatggatttgctttctttcaaaagctggcataggttctaaaaagactggtctacctgtgcgtttaactttttctgctgttctattggccagacgctctaaaattgcctgacgcttttcacgataatcacctacattaacaaccacggatagcttatttgctgcgattcgatgaatatatacttgtgccagatattgtaaagcatttagtgtttttccatgttttccaatcaggagtccttgcttttgtgtatctagatgaaaaacgatcaagccatcttctcgtgctgtttttacaagggctggtgcattcaatgctttagaaatgttagtcaaatataaagcaagatgagtaagtgcttcatcatcagaaagatcctttgcgttaggtttttcttccgtatctgcttgcgattttgcagtaagcactgattcctcaagttcaggttctaagatttcttcaattatttcagttactgattctgtgatgatttttgattcatccgcagcacttctttcaattgatacgcgggcattctttttaccaatacccaaaaaaccttttttcccctcatccaaaacatcgatcactgcttgatccttgtttaaacctaaagcatgcaatccttcttggatagcttcatctactgtaagaccttcataaatcggcattatctgcaacctccttttatttcttacgttttttcttaggactcattgctttcttcagcgctctttctcgttctctttcttttcgagcagcttcttctctttcttgacgaatcttgaatggattattcaaaatcaacgtttgtactacttggaatgcattggatacaacccagtataaagataaaccactagcgatattgatccccatcaataaaatcatcaatggcattgcaaaattcattatctttaaactagcatttgattctatttgactcatactagacaaataagtacttgcaaatgtaaatagtgcagctaatataggtaaaataaagtaaggatctcggtcccctaattgtaaccacaaaaattttccttcttgtaaagctggaacccgcgaaatcgattgccataatgccatcaaaattggcatttggacaagtagcggcaaacatccggcataaggattcacattattttctgcataaagccgttgcgtttctgcacgtaatttattttgtgtttcactatctttcgatgcatattgttgttgcagagcttttaattttggctgcaattcttgagtttttcgcatactctttgtttgaaaatgcattaaaggcatgagaataatccgaatgatcagagtaaatagaatgatcccaatcccagcattgccaaaagatagcatcttgatcgcttcagcaaagtaataaacgatataacgatcccataatcctgaactttgcgcattcacttccccagttgcgctacaggcagacaagacaactaccaatgagacgatccccaaaaatagtaagatacgttttccttttttcacttaaataattcctttccgttagttaatgattttagcaagctttaacacatgctctaaattcgagtatacttcttgagaagagcaattcgaaacacttggacgagcaattacgatgaaatcgagtgtaggtttgattctaggttgcatatccgtgagacttgctctgatttttcgtttgatctcatttcgtttaacagcatttcctactttttttcctacagataatccgacacgaaaatgtggctgatctttctgcagaacatagacaacaaatttacggtttgcaaaagactttcctttctgaaaaaccttttgaaagtcttgttctgtttttacgcgatatgcctttctcatcttggttccttcatttctttctactttggttactcacctgtcaataataccatatttagtaaaagggattcactatattccttaaaaaacggcataaaaaaaaccactggcattcagtggcttatgcagaaataacctttctgcctttacgacgacgacttgctaaaacacgacgtccattttttgtactcatacgtttacggaatccgtgaactttttgacgtttacgtttatttggttgataagttcttttcatttagtgacacctccatcaaaataatgattatgcgcatagacatactttgatagtataacgagtcagacagtgttttgtcaatataaaattcacccactttactgtcttgttttccacataaactaaatgaactgtgtgttacttgtggattttgcatttttgtggataacttatttccacaagtttttcctgctttttccacaaataaacacccttctaaaaagttatccacatacacttttctagctgtgcataaatcagtaaaatgcttttacatcaacgtatttgattaacagttacttgtggataaacaagagattattgtaacaatccacaaacactcctcctctgtggataaccgtaaatttgataagttaatttctcctgttcttttttccatagatgtggaaaagtatttttttctaaccttttttattataatctgtggaaaacttcttccatccgtgctaaattagtattatctattcttagctataggaggacaatttatgtcatctgctgattccatttggcgagatcttcagaaatcttttaaagaagaacttaatccagcaagttacagtgcttggatcgaaacagccaacatattatcttttgaaaaaaatcagttattgattgaagtacccagtgatcttcataaatcttattgggaaaaaaatctagctgcaaaaattgttgagatgggcttcatgaagaccggtgaagaactaattcctagttttgtcactgctgaagaagcagaagctctgcaaaaatcgccttctgttgaacaaacagttactgaaaaagcagaaaaaaaaggaaaaactattctaaacgaaaaatatacttttgatacatttgttataggtaaaggaaatcagatggctcatgctgcagctttagttgtagctgaagatcccggttctatctataatccgttattcttctatggtggtgtgggtctaggaaaaactcacttgatgcatgctatcggacatcaaatgctgttaaaaagaccaaatgcaaaaatcaaatatgtgagcagtgagaacttcactaatgattttattacttcgatccaaaagaataaaatggaagattttcggaatgaataccgaaatgttgatctcttacttgttgatgatattcagtttttggtcaataaagaagggacacaagaagaattctttaatacatttgaagagctttatcgaaataacaagcagatcgttttgacaagtgatcgcttaccaaatgaaatacccacgttacctgaacgattggtttcacgtttcgcatgggggttatctgtagatattacacctccagatctagaaactagaacagcgattttaagaaaaaaagcagaagctgaacgcctcgaaatccctgacgatacactgagttatatcgcaggacaaattgattcgaatattcgggaattagaaggcgcattagtgcgtgtacaagcatttgcaactatgcaaaattcggatattacaacaagcttagctgcagaagcaatcaaagcattaaagtcaagtcatggaagcactcaagtttctatattgcaaatccaagaggaagttgcaaaatactaccatatccatataaatgatctcaaaggaaaaaaacgtgtcaaaggaattgtcgtacctcggcaaatcgccatgtttctttctcgtgaactaacggataactctttacctaaaattggagctgaattcggaggtaaagatcatactacagtcattcatgctcatgaaaaaatccaacatctttcagaaacggatcctaccattaagaatgaaatttcagaaatcaaaaacattctctttagttgagttgtggataaagcaaaaacatgtcaaaaagttatgcacaggttatacacaggcgttttcgttgacgtctcaatgatattttctagttatccacaatactaacaagcctattactactattaccttatttaataactataaataaaaggagtgctcctaatgaaagtaactttaaatcgaacagagttcatgcaagaattacaaaccgttcaacgtgccatttcatcaaaaactaccataccgatccttacaggtgttaaattagttctaactgataaaggtttaactctgacaggaagtaatgctgatatttcaattgagacttttttaagcgtagagaaagaaaaagttcaaatgaaaattgaacaaacaggagcaattattttacaagcacgattttttagtgaaatcattcgtcgcttaccggataatactgttacgctggaagtgatagaaaataaccaagtagcaataacttcagggaaagctaactttactgtaaatggattagatgctgatagttatccacatttaccagttgtcgaaagtcaagatcgcatcgaagttcctgctcacattctaaataaaattgttaacgaaacagtttttgctgtttcacagcacgaaagtcgtccaattctaaccggtgttcattttgttcttgaaaataagaaattattagctgtagctacagattcccatcgattaagtcaacgagtaattccattagaaagtggggaagcgaatttcaacatcgttattcctgggaaaagtttgactgaattgtcccgttctttaacagatgaagaagaagctattcaaatcagtatcatggataatcaagtattgttccaaaccaatacaatgaagttctattcacgcctattagaagggacttacccagatacaaatcgattgataccatcaagttttaacacagaaattgaattttcagttccagaattgttgtcagccatcgaacgcgcatctttactttcacatgaaggaagaaataacattgttcgtttgtcaataaatgaaaattctgttattttatatgggaattctcctgagattggtaaagtagaagaagatctatcctacgagcaagtttcaggagaaccattggaaatctctttcaatcctgattacatgaaggcggctctaagagcttttggagatacaaacatcacgattcgctttatttctgctatcagaccattcactttggaaccaactgaaagtcaaggaagctttattcaattgattacaccagtccgcacaaattagaatttttcatatttattgtaaatgcatgaaacaaacgtctgaaaatacaaaaatagtttagaagggcttaaaatcgattttaagcccttctttttgtttttgcttattttttatctaaaacaatcaaaacttctcagaatgaaaattatacggataaatttgttttattccttaaaaaagagtataataatggtatacgttcttctatagaatcgagggataatatgaaaatgcaaatacctttagaaactgaatatatgacgttaggacaaatgttgaaagaagtcagcgtaatcagcagtggaggacaagcaaaatggttcctagctgaacatacggtacttgtagacggagagccagagaatagacgaggccgcaaattatatgcgggaatgaggattgagatacctgatgagggtactttttttatggtaaagaaggaagcctcagatgcgtctgaataatcttcagctaaataattatcgcaactatgaatctttggaattatctttcgataaaaatcttgtcatttttttaggcgagaatgctcaaggaaaaaccaacgttttagaaagtatttatgttttagcgatgacaaaaagtcatcgaactacaagtgaacaagagttgattcgttgggatacagctggggctcaagttagcggagctgtgtctcgagggcattctaccataccattagaattatttttaactaaaaaaggtcgtaaaacgaaagtcaatcatattgagcaaaaaaaacttagtagttacatagggcaattgaatgtaattctttttgcccccgaagatctttcacttgttaaaggaagtcctcaagtaagaagaaaatttatcgatatggaaattggacagattgatccgatttatttgtatgatcttgtgcaatatcaaagtgttttgaaacagcgaaatcagtatttgaagcaattatttgaaaaaaagcaaaatgatgagctctatctcactgtgttgactgaacaattgattgaatttggcagcaagatcatttttgcacgacaacgttttgtaaaacgattagcattttgggccaatcaactccatcaaaaaataagtgatgaaaaagaagttttacaaatagaatacttgtctagtgttggtactgtaagtgcatctctagaacaagttcaacaacaattcaaagatgcactggatcaagtgaaaacacgtgaaaaaatgagacagatttctctagtgggtccacaccgagatgatctcaactttttaatcaatgataggaatgttcaaacattcggatcccaaggtcaacagcgaaccactgcattaagtgtaaaattggcagagattgatttgatgaaagaagaaacgggagaatatccgattcttttgttagatgatgtcatgagtgaattagacgattctcgtcagttacacttactagaaacaattgaaggaaaagtacaaacatttattaccacaaccacacttgaacatgtaaaagataaaatgtctgttgaagcagagattttttacgtagacaaaggacacataaaaggagaatagactgaatgacagaagaagaaaaaagtttagttgaacgtgccaaagaatatgacgccagtcagattcaagtcttagaaggtttagaagcggtacgcaagcgtccaggaatgtatatcggatcgaccagttcagaagggctccatcaccttgtgtgggaaatcgtagataattcgattgatgaagcacttgctggttttgctacagcaattcaagtaattatcgaagaagataatagtattactgttgtcgatgacggtcggggaattcctgtagatattcaagcaaagactggcagacctgctgttgaaactgtatttactattcttcatgcaggtggaaaatttggcggtggcggatataaagtttcagggggtttgcatggtgtaggttcttcagtggtaaacgcattatctaccacattagatgttaaagtatacaaagaaggcaaagtttattatcaagaataccatcggggagctgttgtcgaagatctaaaagtgattgacgaaacagatcgtcatgggactactgttcactttgtaccggatcctgaaatatttacagaaactactgtttttaactttgataagttggctacacgtgttcgagaattagcttttctgaatcgcggcttaaaaatttcaattgaagataaacgagaagaacatcctgttctgaaggaatatcattatgacggcggaattaaaagctacgttgaacacttaaatgcaagtaagacagttatttttcctgaaccaatctatcttgaaggggaacaacagggcatcacggttgaagtttctctacaatacacagatagctatcataacaatttgctaagttttgctaataatattcatacgtatgaaggtggtacccatgagtctggattcaagacagctttgactcgggttatcaatgactatgcacgtaagtctaagctaatgaaagaaaatgatgagaatctaacaggtgaagatgttcgagaaggtcttacagcggttatttccatcaaacatccagatcctcagtttgaaggacaaacaaaaacaaaattagggaactcagaagtgcggactgtaactgatcgtttattttcagagcatttcacaaaatttttgatggagaatccagcagttgggcgccaagtagttgaaaaaggactgctagcctctaaagcacgtcaagcagctaagcgtgcgcgtgagatgactcgacgtaaaggtgctcttgaaattagtaatctgccaggtaagctagcagattgttcaagtaatgatcctgagaaatgcgaattatttattgtcgaaggagactcagctggaggatcagctaaacaaggacgaagtcgtgaattccaagcgattctgcctattcgagggaaaattttaaatgtcgaaaaagcaagcatggataaaattttggcaaatgaagaaatccgttcactatttacagcgatgggcacaggatttggagcagactttgatgtttctaaggcacgttatcataaattagtaattatgactgatgccgacgtcgatggcgcacatatccgaacattgctattaactttattctatcgctatatgcgaccaattgttgaagctgggtatgtttatattgctcaaccaccactttatggggtaaaacaaggaaaaaatatccattatatccaaccaggcaaaaacgcagaacaagatttgaagaatacaatcgagtcattgcctgcaacgcctaaaccaagtgttcaacgatacaaaggtttaggtgagatggatgaccatcagctttgggaaacaacaatggatccggaaaaccggatgatgctccgtgtaagtgtagacgatgcaattgaagcagatcaaatttttgaaatgctaatgggcgatcgtgtagaaccaaggcgtgcctttattgaagagaatgcacattatgttaaaaatcttgatatctagccaatcgtaaaggaggaaatagcttgagtgaagcaaaacaaaatattcatgatgtcaatctgacaagtgaaatgcgtgagtcctttatcgattatgcgatgagtgttattgttgcaagggccttgccagatgttcgagatggactaaaaccagttcatcgtagaattttatatggaatgaatgaattaggggttacaccagacaaacctcataaaaaatcagcccgtatcgtcggtgatgtaatgggtaaatatcaccctcatggtgatagtgcgatttacgaatcaatggtgcggatggcgcaaccgtttagttatcgttatatgttagtggatggtcatggtaactttggttcagtcgatggtgatggtgctgccgcgatgcggtatactgaagcccgcatgagcaaattagcaatggaaatgctaagagacattaataaagataccgtcgattttcaaagtaattacgacgatactgaaagagaacctgcagtattgcctgctcgttttcctaatctcttagtcaatggtacaacaggtattgcggtaggtatggcaacgaacattccaccacataatttgaatgaagtaattgcggctattgagctgctaatggaaaatcctgaagtaacaacgaatgaattgatggaagttttgcccggacctgattttccaacgggcggcctagttatgggtaaatcaggtattcgacgggcctatgagacaggtaaagggtccattacggtacgaggaaaagttgaagttactgagatgcctaatggtaaagaaagaattctagtcaccgaattgccgtacatggtcaataaagcaaaattaattgagcggatttcagaacttcatcgagacaaacgaatcgaaggtattacggacttgcgcgatgaatcttctcgagaaggtatgcgtattgtgatcgatgttcgtcgtgacgttagtgcttcagttattttgaacaacctttataaaatgacggctcttcaatcatcttttggctttaatatgctggcgattgaaaaaggcgtaccaaaaattttaagtttgaaacgaattttagaaaattatatcgagcatcaacaagaggtagtaacgcgtcgtactcaatttgacaaaaacaaagcagaagcacgtgctcacatcttggaaggattacggattgctcttgatcatattgatgaaatcattgcattgattagagcatctaattcagatgatgaagcaaaaaacacaatgatggaacgtttcagtctatcagatcgacaagcgcaagcgattctagatatgcgtttgcgtcgtttaacaggattagaaagagacaagattgaaaatgaatatcaaagtttgttggaattgattgctgacttaaaagatattttagctaatcctcagcgagttttagaaattatccaaacagaattgcaagaattaggtcaacgctttggtgatgagcgccgaacagaattacttgttggagaagtattgagtcttgaagatgaagatttgattgaagaagaagaaattgtcattacgctgacaaataatgggtatatcaaacgagtagcaaattctgaatttcgggctcaacgtcgtggaggtcgtggtgttcaaggcatggggattcacgatgaagactttgttaaaacgttgatttcttgttcaactcatgatactttacttttctttactaacatggggaaagtttataaagctaaaggatacgaaattcctgaatacggacgagctgctaaaggtattcctgtgatcaatcttttaggtattgattcaaacgaacgcatcgaagcgattatctctgcttctggaggacctcaagaaggacgttatctgttcttcacgacacggctaggtatagtaaaacgtacatcagttactgctttctccaatattcgggccaatggattgattgctattgggttacgcgaaaatgatgaattagttaatgtagtagaaaccaatgggcaagatgtgatgattattggtacacacaatggctattcagttacatttaaagaagagctggttcgagatatgggacgaactgctgcaggcgttcgaggcatccgtttaagagaagatgactatgttgtcggcgcttctgtgatcaaagaagatagtgaagtattagttatcacagagaatggctacggaaaacgtacaaaaggttcagaatacccaataaaagggcgtggtggtaaaggaataaaaactgcgaatattactgcgaaaaatggaccgttagctggattgactacagtttcaggcaaagaagatatcatgctaattacagacaaaggtgtcattatccgatttaacgctgaaacagtatctcaaactggacgtgcaactttaggcgttcgcttaatgaagatggaaaacggagcgaaagtagtcacgatggccactgtagatccggaagtttctgaaacagaagaagaaatatcttctgaaagtcagaatgatgaatagtaatgtaactccaacacgatgttgttggagtttttttaataaatgaaaatattttgtgcgtacttattgatgcaagcaattttactgtcaaaagtcaaaaaattaatcttgtattatggatgaaaaaaatgtataattggtatttgtgagtagtctaatcaggcgactctctctgctcctagaatatactaggggcctaagaccacagggaggtgaataatcaatggaaaatacgaagtatgagatcttatacatcattcgtccaaacattgatgaagaagcaaaatctgcattgatcgcacgttttgacacgatcttgacagataacggagctgaagttatcgagtctaaagattggcaaaaacgccgtctagcgtatgaaatggatggattccgtgagggtatctatcacatcgttaaagtttcttctccatcaaatgcaagtgcaatcaatgaatttgaccgtcttgctaaaatcaatgacgatattatccgtcacatgattgtcaaagaagaagaataaaattgtttcacatgaaacaaagcgatgaggagatgatgaactttgattaataatgttgtattagtaggaagattaaccaaagatcctgatttacgatacactgctaacggcactggcgtcgcgtcttttacattggctgtaaatcgtaattttacaaaccaaagtggagaacgtgaagctgatttcatcaattgtgtgatttggagaaaacctgcagaaacactggctaattatgctcgtaagggtacattacttggtgtgactggaagaatccaaacacgttcttatgacaatcaacaaggacaacgtgtatatgtaactgaagttgtagcagacaattttcaattgttagaatctcgaaatgcttctgaacaacgacgcactaccgaaagcggtggaaatacttcgtataatactagtggttcttctggattcggaaacaatagcacaaatcaaaatcaatcctctcaaccatcaggaatgcctaactttgatcgagataattctgatccattcggaaactcgtcaattgacatttcagacgatgatttaccattctaataaattgataggagggaaatagaatggcacaacaaagaagaggcggacgtaaacgtcgcaaagtagactatattgctgcaaatcatatcgaacacatcgattataaagatacagaattgttaaaacgtttcatttctgaacgtggaaaaattttgccacgtcgtgtaacaggtacaggggctaaaaaccaacgtaaactaactgttgcaattaaacgcgcacgtatcatgggattacttccatttgtaggcgaagaataatttttactattcaaaagttgacaactgtttttgacagttgtcaactttttttgtatatactattactaaaaacatttagtgtatttgttatttaattcaatctttaaataacgaaaaaatctttgccggtatttgatttgtggtttcctaaataaagtttcacgtgaaactttatttaggaaatcgcttattcgtataagatgtggtaaaatataaaagtgtttaatatttctatagcagtttattgaggagttaaattatgtcagcaatcggacttatttcaattgataactatgatgatctaattgacaaaaaagatgacaaacaaatatcctacttgaactctttgatcacgacgctgatttcagattgggccagtgaaaatcatatcttttataagcggattaattctgaacgctttctttttgttgccaagattgaagatattgagaagatgaaaaaagggaattttgaatttttgacacgtgttcgtaatattgctgaaaagaatgacttagccttaaccattagtatgggaatctcttacggagaagaatcgctagagacaataggcgaagtagctcaaaataatttagatatcgccttggtacgtggtggggatcaagtggtactgaagaaagctgatgaggaagcaaaaccacagttttttggggggaatacagatggtacgcccaagagaactcgtgttcgctctcgggctatgagtactacattaaaaaaaatatttgctgataataaaaaggtatttatcatgggacacaggtaccctgatatggatgctttaggtgcagcctttggagttgcttatatggcaatgatgagtgaacgtgaatgttacatcattttaaatcctaaagaaattactgcggatattgaacgggtattagaagaattgaagaaatatcctgatttagaacgaattgttatttcaggtgaggaagctgtaactttatccaatgaggaaagtgtcttagtaatggttgattatcataaaccgtctatgtcaatctcacaaaaagtttatgatgtatttgataaaattgctgtaattgatcatcaccgtcgcggagatgagtttccagataagccgttgttgacttatattgaatcaacagcatcttcggcatcagagttagtcgctgagttgatacaatatcgttctactcgcaaaacacaaattcccaaatttatcactacttctttattggcgggaatttatgtcgatacaaagaatttctctgttcgaacaactggtagaacttttgatatagctggatacctcaaaaatcatggtgcggatacttcacttgttcaatatatgcttagtacggatttagactcctatttaatgattagtgaactagtttctaaaagcaaacattacaaagaagatatcgttatcgcagtagctgatgataaacgagtatatgacagtgtgacagtcgctaaggcagcggatacgcttttatcaatcaatgggattcatgctgcttttgtgatcacaaggcagcctagtaagttgatcggtattagtgctcgaagcactggcaaaatcaacgtgcaagttttaatggaagcacttggtggaggaggccacttcacaaatgcagctactcaaatcaaggataaaagcttggatgaagtcaaaaaaatgttaattcaagaacttaacaagttagaaagagaatgaggagtgaccacagatgaaagttattttcttgcaagatgttaaaggaaaaggaaaaaaaggagatattaaggatgtaccaaatgggtatgcacaaaacttcttaattaaaaacaacttagctaaaccagctaataatgaaagcatggccgaattaaaaggaaaacaaaaagcacaagaaaaacatgaagcggaattactggcggaggctgaagaactaaaaacagtccttgaaaaggaagaaacagttgttagaattaaagcgaaagcaggagaagatggtcgattgtttggttctattccatcaaaacaaattgctgatgctttgaacaaacaatatagtataaaattggacaagcggaaaattgagttagaacaacccattcgggcattaggttatacaaaggtgcccgtcaaattacattctaaagtaactgctacaattaccgtccaaacggtacaagaataaaaagtttcccaacagtaaaatgttgggtttttttaagcggatatttttgtaatcgaggttctcttgtgctttgatttgatatcctgtagaataaatgaacactagattaggagcgaaagtcatgaatgaagtatggcaaaatcaaattccgcctcaagacattgaagctgagcaagcggttttaggagcaatctttttagacgcggattcaattattgatgcgatggaaattattgaaccacaagatttttatcggcgcagccatcagattatctttcaagcgatgattcaactcaatgatcgtaatgaatccatcgacctaatcacattgaaagcagaaatagaaaaaagtaatagtctggaagatatcggcgggcttacttatttaacagaacttagccaagcttctccttcggccgctagtattgcttattatgcaaaaatcgtggacgacaaagcgactttacgcaacttgattcaaaccgctagtcgtatcgtgacaaaggggtttgaacaagatgaagatgttcaatcgattgtcgatcaagcagagaaaagcattttagaggtttcagaaaaaagaaatagcaacggatttcagtctattgctgatgtgttaaatcgaacaattgaaaatattgatcagttagcgcaaaataacgaagaaattaccggattgcctactggctatgcagctttagataaaatgacagctggacttcaaaaagaagagctaattattttagcagcacgtcctgctgttggtaaaacagcttttgcactaaatatagcacaaaatgtaggaacaaaaacagatcgttctgtcgccatcttcagcttagagatgggtgcagaatcattagtcaatcgaatgctatgtgcggaaggatctattgaagccagccatttacggaccggtcaactgtcagaagaagagtggcgcaatttgatcgtggccatgggaagtttgtcgaatgctagtatttatattgatgatacacctggaatcaaaatttccgagattcgagcacgttgtcgtaaattagcacaggaaaaagggaatttgggtttgatattgattgattatttgcaattgattgaaggtacaggaagagaaaaccgtcaacaagaggtctctgagatttctcggcaattgaagaaattagccaaagaattaaaagttccagttattgcgctttctcaattatcacgaggggtggaacaacgccaagataaacgtccagttttaagtgatattcgtgaatcaggatctattgagcaagatgcagacattgttgcatttctctatcgagacgattactatcaacgtgaaggtgacgaagaggatggcggtgaagagccgcaaaacaataatgtcattgaagtgattattgaaaagaacagaagtggagcacggggaacagttgaattattgtttatcaaggaatacaataagttttcctctctatctccaagagttgagtttgcataggataggttgcgactggtactattgccggttgcttttttttattcgtatttagctttgtataaaaaaaataaataaaatatagttcgtttttttctgctttttttcattttaatgaattcaatcattcgattttagattgaatccatgatcgaatactggtacaatacttatggagtgcaatatataaagaaagaggtcattaaatgtcatctgtagtagtagtaggtacccaatggggcgatgaaggaaaagggaagattaccgactttttgagtgaaaatgcggaagtgattgcacgttatcaaggtggagacaatgcaggacatactattaagtttgatggagtgacatataaattacacttgattccatccggtattttttataaagataaaattagcgtgatcggaaatggcgtagttgtgaatccaaaatctcttgttaaggaacttgcctatctaaaagagaataatataataacagataatttgaaaatttctgaccgtgcccatgttattttaccgtatcatatcaaattagatcagttacaagaagatgctaaaggtgacaataaaatcggaacaacgatcaaagggattggtccagcttatatggataaagccgctcgtgtaggtattcgaattgctgatcttcttgataaagaaatttttgaagaaagattacgtatcaatcttgaagaaaaaaatcgtcaatttgttaaaatgtttgatgatgagccgattgcttttgaagatatttttgaagagtattatgaatatggtcaacaaatcaagaaatatgtaacggatacttcagttattctaaacgatgcgctagatcaaggaaaacgcgtactgtttgaaggtgctcaaggagttatgctagatattgatcaaggaacatatccgttcgtaacatcctcaaatccagtagctggtggagtaactattggtagtggagtgggtccttctaaaatcaataaagtagttggtgtttgtaaagcatatacttcaagagttggtgatggcccattcccaacagaactttttgatgaaacaggcaatcaaattcgtgaagttggccgtgaatatggtacgacaactggtcgtccacgtcgtgttggttggtttgactctgttgtcatgcgtcattcaaaacgtgtttctggtatcacgaatctgtctctaaattcaattgatgttttgagcggcttggaaactgtaaaaatttgtactgcttatgaattagatggagaattgatttatcattatcctgcaagtctaaaagaattgaatcgttgtaaaccagtctatgaagagttaccaggctggtcagaagatattactggatgcaaaacattagctgatcttcctgaaaatgcacgtaactatgtacatcgtatctctgaattagttggggttcgtatctcaacattttcagtagggccagatcgtaatcaaacgaatatattagagagtgtttgggcacaaatctaatcagtgggtagaattaattagtagaattgaatagtagaaagaacaaggcagagtattttagaagaaaatcgatgattttcccgtcttcaagtatgatttcttctgccttgttctttttttgctataataaggttatcaaagggggtgtacctatgtatcaaatcattacagattcatgttgtgatctaccagcaaaaagattagctgaattgggtgttcaatatatatctatgacaattgaacttgaaggaaaagaatatatcgatgatatgggtgaacaatttgatgccaagtggtttttagaaaaattaaaagaaaatgcacaaccgacaacttctcaaatcaacgtcggacgttatgttgaattttttcgtccatatgtagaatcgcacacaccgatactttatctaggtttttcgtctggaatgagcggttcttttcaaagcgctgttcaagctgttgctattcttaaagaagaataccctcatgctgaaatcacactcattgatacaaaatctgctagtttgggagagggttttttagtagcggaagcagcaaaaagacaaagtgaaggttggtctcttcatgaggtcagccagtgggtagaagaacataaattatctctagattcttgggtgacagttgatgatcttcgacatcttgaaagaggcggtagaatatctaaaacagcagcggccattggcggcctattaaatgttaaaccaattattactgtagatacagatggaaagttgaaaaatgtcgataaagtgagaggtcgaaataaatcaattcaaaaaattgttgataaaacagtagcgaatctgcgtgaatctcaaatagagacggtttatcttgcaaatgcaggtgatgacgaagcagcagaaaaagtgttaagactcttgaaagagcaatttccagcattaattatttatcattatcctttaggaccaacaattgccagccatacaggatatggttgtttggcacttttttcattcggaaaaacacgtttgatcagtgattgattttctcttaaatataaaagccaaatgcaagagttcttgcatttggctttttcatttggagatcaattatataattcttgaattctttgttgtacatctttgttgtctaagaactcatcataggtagtctctgcacgatcaacaacacctttatttgaaacggcgataattcgatttgcgagcgtttgaataaattgatggtcatgagaggcaaaaagtaaagagccggtaaaagccataaggccatcattcaatgcagtaatcgattctaaatctaagtgatttgttggatcgtctaagacaagaacattagcttttgatagcattagttttgataacatacaacgaactttttcgccacccgatagaacattgactggttttaagacttcatcacctgaaaacagcatccgacctaagaaactacgtaagaatgtattatcatcctcttctttactagcatactgacgcaaccaatcaacaattggtgtatccgtatcaaattcaccagtagtatcttttggcaagtaagcgtgttgtgttgtaacaccccagcgtacactaccagtatctggcacgatctcgcccataataactttgaataatgtagtcgttgtgatgtcgttgttggcaataaaagcaactttgtcatctttattcaaagtgaatgagatattatctaaaatctttttaccgtcaatagtcacactgacattatctacttgcaacaagtcattcccaatttcccgttctggtttaaatcctacaaaaggatagcggcgtgaagaaggttgaatatcatcaagtgtgattttatccaacattttctttcgagaagtggcttgctttgattttgacgcgtttgcactaaagcgggcaataaattcttgcagttctttgatttgttcttcttttttcgcatttgattgtgattgcaattttgctgctaattgacttgattctaaccaaaaatcatagtttccgacatacagtttgatcttcccaaaatctagatctgccatatgggtacatactttatttaagaagtgacggtcatgggaaactacgataacggtattatcaaagttgattaaaaattcttctaaccagttaatagattggatatccaatccattagtcggctcatccaagagcaagacgtctggttttccgaaaagagcttgtgctaacaacactttcacacgttgaccagctgttaattctttcatttggacatggtgtaattcatcagggatattcaacccttgtaagagaactgcggcttcaggttcagcttcccaaccatccagttcagcaaactctccttctagttcagcagcacggataccatcttcgtcactaaagtcttctttcatgtagatcgcatctttttctttcattacgtcgtataatcgtttgtgacccatgataacagtttcaataactgggtattcttcgaagtcaaaatgattttgtttcaaaacagccattcgttcatcgggtcctaatgaaacatttcctgtagatggttggatttctccagataatatttttaagaaagttgatttaccagcaccatttgcaccaatcaaaccatagcaattgccaggcgtaaacttaatattaacatcgtcgaacagtttgcgatctgaaaaatgcaaacttacatcacttactgtaatcaattcttttcctcactttatatatattgacattgagtctcctagcattatagcgatgaatgttgaaagtttcaagtaaactcaaggatttccctacaatcaaacaaggagcttagaattattttgagtaaaacaaaaggctagaatcaagcgttttcctatgctagagtaaagggagaagataggaggagagaaatgttttggttgaatggttaatgcaactgtccccgtggcaccaggctttggctggtactttatttacatacgccatgactgctctaggtgcggcacttgtttatttttttaaggatatcaataaaaatgttctgaatacgatgttgggattcgcttccggtgtaatgattgctgcgagtttttggtcattactagaccctgctatcgctcgtgcggaagaaaatggggatatcccatggcttgtggttagtattggttttggattgggtggactatttttatatgctgcagacaaaacattaccgcatatgcactttggtcctaaccatgaaacagaaggctttccaagccatttaaaacgaacgattctgttggtcttctccatcacattacacaatattcctgaaggcttggcagttggtgtggcttttggagcagccgccagctcggaagatcctcgggcagcagttttggcagctatttcagtagctataggtattgggatccaaaattttcccgaaggagctgctgtatccattcctttaagacaggaaggattgagtcgtaataaggcctttgtctatggacaagcttctgggatcgttgaaccgattgccggtgttataggcgctttgctggtaacaagtatgacagccgttttgccatatgctttagcatttgcagcgggagcgatgatttatgtagtggtagaggaactaatacctgaagcacaacaaacagctagtagtcgacggcattttgcagtttttggtgttatgacaggcttcattctgatgatggttttggatgttgctttaggataatcaaaaaagacttggaacagataatgctccaagtctttttgttagttatagtatttttttggtcgttgtcgaacgtttgtcagccaccgaacaattagaacagctaacaataaaggaataccaaaacgaaaaattaaaccaatcaatccgccaatcaatccgccaattaatcctaagacgagagataagagcaatgaagccagaactaaaactgctacaacagttacgattttacctaacaaactttgtgtattcataataaatcctcctatacctttttcttaaatttattttatcaagaaagaagaggtggaacatccatcttaaggcggaattttttctccgtcggtagtcaaagagatgttagtgaggtaaactggtaaaaaaaagcaggtgagaacatgaaagcaattatcaaaagtaaacattttattacggaaggagggtgcaatgcttgccaggcctttgagttagaaacgtttacgatgcacttagagaatggtaaagaagtttctgtagaaaatctggacgtagcatctttagtaatgccacttatccaaaatgagcattggcagacagcgctattattagacgaagaagagggctacatttttcgaaaagagaatcaagaagtgaaatttgtggataatgatgctacacaagtatttgtttcaaaagaacaaagaattgtttgtcagaaaaaagcctgtgatcaggaattgtttacagaagcaaatgcagttttacagcaactcttcgctatggaaccagttgaatttgtaattgaacaagcataatcaatcagaaaagcagcttgaaaaagaaactttcaatcaaaagtgaaaatcacttaaagattgaagtctccggaatcaagcagcttttttatttacgtatttgaccttctccatagataatatatttggtggaagtcagagcttcgagtcccattgggcctctagcatgcaatttctgagttgaaatgccgatttctgctccaaaaccaaaaacaaacccatccgtgaatcgtgtagatgcattgacatatactgcagcagcatctacttcttgtaagaatttctgagaggcaaagtagttatccgtgacgatagcttcagaatgcttagtgttgtaatgattgatgtgggcaattgcttcatcgatggaatctacaactttgatggctacaatataatctagaaattcggtttgccaatcttcttcagtagcaggttgcgcatttattaaatagtttcgcgcgttagtatcagcacgcaactctactttatttttcagttctttttctagtaaaggtagaaagtctgctgcacaacttttatgaacgaggatcgtttcgattgcattgcaaacagaaggtcgctgagttttggcattgacaacaatgtcgacagccatcggaagctgtgcatctttgtcaataaagatatggttgttacctgttcctgtttcaatgacaggaactgttgctgtttctttgacacgacgaatgaggttagcaccgcctcgtggaatcagtacatccaagtacttgttcaagcgcatcatttgatcagccactgcatgactggtgtcatcaacaaattgaatagaatagggtgaatatccattggcgcttaatgtttcttgcaaaagatttacaaggatttgatttgagtagaaggcttctttacctcctcgcaaaatgacagcattcccagatttgaaacatagaccggcagcatctgttgtaacattgggtcttgcttcataaataattcccacaacacctaatggtacacgttgtttaccaattaagagattatcactattgcgccacattttgtccacgattccaagtggatcagggagctgaacgatttttcgaataccagttgccatctccttgattcgttcatcagttaattctaggcgatcaattaaagttgaatttaatgcatttttttttgcagcagcaaggtcttttttattttctgttaaaattcgtgaacgatttctttcaagtgtatcggccatagctgatagtaagtgatttttctcagtagcggttagtaagctaagtgaggccgcactcttttttgcttgctttcccaattgcattaaatcgatcataatgtttcctccttgtaaaagtaagtgccaacctttttgccagctaagatatcaaaaatgattttaggctgtttcccattcgccaagatcattgtggcatctgttttgagaatacgatccgcagcttttaatttgcttgacatgccaccagttccatacggacttccttttccggtagcttgtttcattaaatcaggtgtaatctcagtaatttcatcataaagtttagcagttttatgatgtagcggattagcagtataaaacccatcgatgtcggatagcataatcagcagatccgcatggactaactgcgctacaattgcagataattgatcattatcaccaaatttagtaagatggtccaactcatctatggcaactgtatcattctcgttgattattgggataattcccatcgctaagagctgctccaatgtattacatacattttctcgactttgaggaaactcaataatatctcgagtcaacaataattgagcagttttttgattgtaaacttgaaaacggtgattgtaaatattcattaattcggcttgccccacggctgcaacagcttgttgctgggggatttctacaggacgttgtggaatgtttagtttattcatccctacaccaatagcaccagaagaaacgagaataatctctttgttttgattctttagatcggacagaacaaaagccagttcatcaatactcgagaagttgatatttccattgggatagacgagggaactggtcccaattttgataacgactcgattcgctttttttagtttctctcgcatggatgtaaccacctcttctgaattcagtaaataatattttttctattgtactagcaaaatagcctttcgtcatgtcctttttctattttcttcgtttttttgactgcggaagcgaagaaaatataaagagtttctgttaattttgttttcattaaagaaaacaagggttactatgctaaaatgactatatgtttattaattggaggaaaagatgaagacacgtggatttgaaattgtttcaacatatgcagataaggatatagctcttccgcaacgcgcaacacaccatgcggcagggtatgattttgaagcggcagaagaagtcgtaatacctagtatatggaaagcggggttgatgaatggcatccaagcgttgacagctaaagatgttcaaaaagcaatcaaaccgacactggttccgactggaatcaaatcatatatgggaaaagaagagtatttacaattaacgaatcgttcgagcaatcctctcaaacgttttttgttactaacaaatggtgtcggagtcattgacagtgattattacaataattctgataatgaagggcatatcatgtttcaatttacgaattttggtcccagtgatttgaccatcaaaaaaggtgaacgaattggtcaagggatcttcttgccgtttttaaaagcggatcaagatgtaaccagtcaatcacgctctggaggatttggttcctcagatctgtgattgttcgatatacgcatgcagtcagtcctagataacgaattggaggtttgcaatggctaagaaagcaaagagtcagtttgtctgccaaaattgcggatattcttcaccaaagtatttagggaagtgccctaattgtggtagttggaattcgatggtagaagaagtgattcaagaaacaacggatcggcgagtacggactactcttacgggacaacggatgcaaccaacaaaaattgctgatgtcataccaaagaaagaaccacgagtacagaccaaactagcagagctaaaccgagttttgggtggtggtgttgttccgggatcattgattttgattggtggtgatccaggaatcggcaagtcgactcttttactgcaagtctcacagcagcttgcagctattggcggcaaagtattgtatgtttcgggtgaggaaagtgcagagcagataaaaatgcgtgcccagcgtttaggagccattgatacggaattttatttatatccagaaacggatatgtctgagataagcaaggcaatcgaaaatctaacaccggattatgtcatcatagattcgatacaaacgatgacacaaccagatatcactagtgtggcaggaagcgtgagtcaggttcgagaaacgactgccgaacttctaaaactggctaaaaccaacgggattgctatttttattgtgggacatgtaaccaaagaaggttcaattgctggtccacgaatgctagagcacatggtggacaccgttttatattttgaaggtgaaaagcatcacagcttccgtattttgcgtgccgtcaaaaatcgatttggttcgacaaatgagattgggatttttgaaatggaagcaggcggattgaaagaagtagccaacccctctcaagtctttcttgaggagcgattagaaggcgctacgggttctgccatcgttgttgcaatggaaggcagtcgaccgattttagtagagatccaagctttggtgacaccaactatgtttggtaacgctaaacgaacgactaccggattggattttaatcgtgtttcattaatcatggcggtccttgaaaaacgggctgggttgcttctacagaatcaagatgcttatttaaaagcagctggtggtgtaaaattaaatgaacctgcaatcgatttagcaattgcagtcagcatagcctcaagttataaggaaaaaggtacgagtcctacggaatgttttatcggtgaaattgggttgactggtgagattcgacgcgtcaatgcgatcgaacaacgggtaaaagaagtgcaaaaattaggatttactaaagtatatttacctaaaaataatcttactgggtggcaaccgcccaaaggtatcgaagtagaaggcgtgtcaactttatcggaaaccctacgaaaagtttttcgttaattctgataaggtgttagttaaaaaaaaaagaataaattcgaagatgagacgaaaataacgaaattatcagaacaagaatgaatgaagactgtttattgagaactatttgcatcagaaggtgctatctttgtccagctctttctaaaaaagattttttcgtttatgagtctcagcttcgtactaaattagtttggaggaacgtgtatgcagaaacgagtcattactgcgctaatggttcttgctggagcaagtttaggtatctcattaatgcctgttgcatggcaaaccattggtcaatcaaaaaatgaatggctgaacaataatatcactaatagcttgcttggagcccttattttctttttattatctttgctattagcgaaatatattgcagctggaattcgtaaaattgaagaaaaattgagtgaattgagtctaacttatttattatttggagcaatcggatcaattattggtttaatgatcggggtcattgtatcgattcctttttataattgggatattccttttattaacggaatcgcgcctattttagtaatggcgttgttgggatatcttggctttcaaattggcacgactcgaatcgaagaatggaaaaaaatcttttcttctaaaagcaagaaaacagaacctgttgaagaacaacagatgcttgatcgtaaaatagctgatcattttcataagtataaaattctcgatacgagtgttatcatcgatggacgtatctacgacattgctaagacaggttttcttgaaggggtcctattaattcccaattttgttttatatgaattacaatatattgcagattcaggagacagcttgaaacgtgtacgaggtcgacgtggattagatattttgaatgctttgcaaaaagaagaaggtatcgctgttgaaatgtatgagggtgacttcgatgatatttctgaggtcgacagcaaattgatcaaattagcaaagatccttgatggtattgtggttacaaatgactataatttaaacaaagtttcagaatttcaaaatgttcctgtgttaaatatcaacgctcttgcgaatgcagttaaaccagtagtgattcctggagaaacaatgaatgtacttgttgtaaaagctggaacggaaagacaacaaggtgtcgcttatttggatgacggaacgatggttgttgttgaagatggacagcattacatgaatgaacatatccaagtagttgttacgagcgcactgcagacagctgcgggacgaatgatatttgctaaaccggctcattcaagtcgtggaatcgataatcaggatgacacaaaaaattagcaataatcaatggcaattggcggattttacgccggttgcctttactattttgcttaatgattgtacaattctagctgagcgaactattttattatcggagattttccctataagctagaaggtaaaaaccgaacagcaaaggattgtttgcaaatcagatgaaggaagaggaaaaagatgactaaagtgcgagtacgttatgctccaagtccaactggacatctacacatcggaaatgcccgaacagcattgtttaactatttatttgcacgtcataacgatggcgaatttattatccgtattgaggatacggatcaaaaaagaaacattgaagatggtgagaagagccagctagagaatctcgcttggttgggtattgattgggatgaatcccctgcaaaccctggagagtacggaccgtaccgccaatcagaacgcggtgagttgtaccaaccattgattgatcagttgctagcaagcaatcgtgcctataagtgttattgtacagaagaagagctagaagcagagcgtgaagaacaacgcgaacgtggcgaaatgcctcattatggcggaaaatgcgctaatctaacaccagaggagcaagcggaaaaagaagcacaaggtatccaaccagttattcgtttccgagttcctagaaatacagagtataagtttcatgatatggtaaaaggtgagatcgtttttgagtcagataatgtaggcggcgattttgtcattcaaaagcgcgatgggatgccaacatataactttgcagtggcagttgatgatcatcatatgaaaatcacacatgtattgcggggcgatgaccatattgctaatacaccaaaacaattgatgatctatgaagcatttggttggcaagcgccacaatttggacacatgacactgatcatcaacagcgaaactggtaaaaagctaagtaaacgcgatgaatcaattttacaatttattgagcagtatcgtgaattaggatacttaccagaagcaatgttcaattttatcgcattgttgggttggtccccagtaggagaagatgagttattttctcaatctgaattgatccaaatgtttgatccagaacgcttgagcaaatcaccagcggcttttgatgccaaaaaattggagtgggtcaacaaccactatatgcgtcaaatggacctggatcagttgacagaaatgtgtttgccatatttaatcaaagcaggtcgaattgaagaagagccttccgtagaaaaaagagaatggctgaaaaaaatcgtctcactatatcaaccacaaatgagttatgctgcacaaattgtggaagtttctgagttattctttaatgaacatcctgaattggatgctgctgcgcaagaagtcttggcgggtgaaactgttccaactgtactcaatgcctttaaagaaaaattgactgcaatgactacagttgacgcaccaacagtaaaagctgcaatcaaagagatccaaaaagaaacaggaatcaaaggcaaaaacttgtttatgccaattcgtgttgctgtctcaggacaaacgcacggaccagaattaccggatacagtagaattactaggaaaagaaaaagcacttgatcatttaaataatgtattataaacacgaagaatagacgaagtacttaccttttttttgaagagagatcacgggtggtgagagtgattaaaaaaagtaaggaaatgcacctaggagtggttttggcgcaagtcaaaaacggcagcagacgttacctgcaccaaggcagaaaattctgtgaacaaaagtggaaccacgtggttgagcgtcttttgaataaggaaacttatttgaaagatgcttttttgtatgtaagtaatcaataggggaagcaggtgagaagatgacttggacccaaaaagcaattgcagcagcgaaaaaaaatgacccttcagctcgatcaacgctggaaatcgtattgtcttatccgggctttcacgcattgttttggcatcgctggtcgcattttttatttcaaaaaaaactctttcttctagctagactcacatcccagttttggcgttttctgacaggcatcgagattcatcctggtgctcagattggcgaaggggtttttatcgatcacgggatgggtgttgtaattggagaaacagctattattgaagatgacgtcgtattatttcacggtgtaacactaggcgggacaggtaaagaaaaagggaaacgccacccgaccataaaaaaaggggcattcatttcagctcatgcacaaattcttggccctgtcacaataggggaaagcgccagaatcggtgctagtgcagtggttcttagtgatatcccaaatgaagcgactgctgtaggaataccagccaaagtcgtaagaatcaaaggaaagaaggttagccaagatgatcaaaatttataatacgttaacacgtaaaaaagaagttttccaacctctcgaacaaggtagggtgaaaatgtatgtttgcgggccaacagtttacaattatatccacgtcggcaacggacgtagtgtagtatcttttgacacgattcgcagatacttagaatatagagggtatgaagtcgattacgtaatgaacttcaccgatgttgacgacaaaattattcggaccgccaaagaattgaaaacttctgctccagaaatagcagatcgttttatcgaagcattcaataaagatactgcggctttaaatgttcaaccagctacattaaatccgcgagtaatggatcacatcgaagacattattgcgtttattcaagtattagtagataaaggatacgcctatatggcaaataatgatgtgtattaccgtacacgtaaattcaagcactatggtcagttaagtgatcaatcaattgatgaattagaagttggggccagtcaacgaacgggtgaagaacaaaagatcaaagaagatccgttagattttgctttgtggaaagcggctaaggaaaacgaaatcgcttgggattcaccatggggactaggacgtcccggttggcacatcgagtgctccgttatggcaaccaaacatttaggagaaacaatagatattcatggaggtggacaggacctgactttccctcatcatgaaaatgaaattgcacagagtgaagcgaaaacgggtaagacgtttgctaattattggatgcacaatggttatgtcacgattggtgaagaagaagaaaaaatgagtaaatctttgggcaatttcgttactgtccatgaaatggttcaaaaaattgatcctcaagttttgcgcttctttttggctactacccaatatcggcgtccaatcaaatacagtgaaacgacattgaaagaggcagaaacaaatctgcaaaaattgagaacagccttagaaaatgcacaatttcgtttgcaaaatagtaaagaaggattcccagaaggaaccgaccatgccatcttagcagaatttgaacagcgttttgtacaagaaatggatgacgattttaatgcagcaaatggtatcacagtagtatatgaacttgcaaaatggttgaacacttacagtgaaagtgcttcaatcgatatagaattattgactgctgcagttgaaaaattcaaggaatggctagccatctttgggatttactttgtgggtgaggaacttttagatgaagagatcgaacaactaatcgaagaacgtatccaagcaagacaagcaagagattttgcccgaagcgatgaaatccgggatgtgctaaaagaaaaagggattatcttggaagacacagcgcaaggtacccggtggagaagagacgcatgagagattacaaacagttgaacggactagcgttagcctatattggggacgcggtctatgaagtatacattcgggactatttgattgaacaaggacaaacaagacctaatcagcttcatcatatggcgacacactatgtatcagcaaaagctcaggcggcattgatccaaaagatgcttgatgaagaaataatgactgaagaagaatatgatttttaccgtcgtggacgaaatagtaaaagccataccagtgcaaaaaatgctgatgtaaccacctatcgcattgctacaggctttgaatccttaattgggtatctacacttaacaaagcaacaggatcgtttagacacgctcgtagcttggtgtatcaagaaagtaggggaagaagatgagggaaaagaaacaaagaaaaccgtcgcgtcaaaacacggtaaaaaataaacagcacactagaaagaattttcgtgaagaaacaactgaattgatagatgagaattttgtattcggttatcatgcggtaattgaagcgttgaaagaaggacgcgggaataaattatttatggcagaggatgccagaggggaaaaaatcgatgggttaaaagaagctgctcgcgcacagtctgtcccagtcaagtgggtgccaaaacaaaagctcgatcaaatgagcaatcaaggcgtccatcaaagtgtgattttagcgatcaccccttatgaatacctatcactggatgaattattggcacaaacaaaagagcagtcattctatttgattttagacaatttagaggatccacataattttggttcaatcctgagaacagcggatgctagtggggtagacggaatcattattccgaaacaccgtgcagtaggaatcactcctgtagtcgtgaagacttctactggtgctgtagaacatattccgattgctcgtgtcaccaatttaagccaagcgattcaacaactaaaacaagctggtttttggatttttggaacggatatgaaaggaactgattaccgtttgtggaatgctcaaggggcagcgggattgattatcggcaatgaaggtcgaggaatgagtgaaggattgaaaaaagatgttgatgagatgttgactattccgatgactggtcatgtacaaagtttgaatgctagtgtggcagctgggttattaatgtatcaagcttttactagtcgaaatggggcgccgcaatgaaaacgcccctgctaatcgtcgatggctataatatgattggtgcttggcctgaattagtcttattaaaaaaccaagatcgtttagaagatgcaagagaggcgttattgcatcgattatccaattattcaaaatacgaaggattaaagattattgttgtatttgatgcgcaattggttcccggtgttactcaaagctatagtaaatatcagttacaagtcatctttactgaagaaggtgaaactgctgacagctatatcgagcgcatcgctggagaattgaatgaccgtttgactcaagtaacagttgcaacgagtgacttagcagaacaatgggttgtgttttctcaaggtgcgttgcgaacttctgctcgagagctttataaaagtattgaaaaaacagaagaagcaatccatcagcatcaaacagacatcaaatttgaaaattttcgcagaaactctccttggacgcctgaacaattagctgaattagaaaaaaaactgcatgatttgagttagggacaaagttggttcgttaaatgagaaactaatgaacaagaatatgttacgctctttttgtaccaaaaattaagcataaaaggagcgtaacaaaatgaaatcaaacgaatcaatcagtaggagttcagaagaatttgaagcaatgtttttcaagtatcgccctatcgtcgagattatgtacaaaaaatattatctcaaagattatgatttagatgattggatgcaagaaggccgtattgtttttaacaaatgtctgcaggcttatgatgaaaaccgtggaacaacactaggagttttgttcaaacgctcgtttgaaaatcgcgtctgcagtttattacggttgcaacaagcacaaaaaagaaaagcacaattaaattcttcttctcttgaagaaaaaatttctcatgaaggaccaaattttctctccgatcaaaatgaacaaactgaaaaagcggagaagtatttaatgcttcaagaaactatgaataaatacgattcgccattttcgaagttagagcaaatcgttataatgaattacttgaaaggattagaacttgaacaaatcgcagaacaaacagaacttccactgcaacaaattaaaatcgcttacaaccgcggtaaaaagaaattgagagcgcttcttatgaacccttagagaaaatcttattgaaagaataattattttatggtaaacttgaaattttctgtaaattatagtatactgttgcttgaggtgaatgcgatgccaacaactttagcaacaatcaaaaaagatttagaaggtcgtataggcagtgaaatcatgctagttgctcaaactgggcgtaaacgtcaaacggaacgccgtggtgttttgacagaaacatacccttctgtgtttgtcgtggatttagatccaaacgaaaattcgttcgaacgtgtttcctatagttattcggatattcttactcgaacggttgagattgaatttttaacaaaagctgtttgatcagaaaagggctgacaaaatgttagctctttttttgtattttttattattgattagttaggagatagtagaatgattgttatgataaaagagttgcatgagatgaccggattagaatttcaccaaatcgctgctttacgtactcaagtgtttgtcgtagaacaaaattgtccctatcaagaagtagatgcaattgatttgattgctaaacatctttgtatttttgatgaacagcaacaacttgtttcttatgcaaggatatattttatcgaaggtacggttcattttggtcgagttttagtaaatcctctgttccgtggacaagggcatggggatcaattgctacaagaaatcatcaaacaactaaatcgtttctatccaaatgctccgattgaaatcgaagctcaagcgcatttgcagaaattttacgggaaatataattttgtcactgtttccgatccttttgatgaagatggaattttacatgtggttatgagaaaagagaaataaaagcagtcattacttataaaaaaaaagatgaacaaatcatgaataactctctgctctgacatgtatttgccagagcttttctgatttcaagagctatccattattgttcgaatcattctaaaaaactatctagttaaaaggatcacggtttatatcattagttgtgatattggtacgggattctgtttgtactttcaataagtcacgaatttcttgaagatagtcttcggcagtaacttctggttcttcttcttcaactggtttttgatgaagattgcgcaatttattcacagctttaacgattaagaatagaacaaaagcagtaatcaagaatgtaataattgcagtaatcacttgaccgaaattaaagacgacattttttttaggctcccaaacaagccctgaaaatgcatcttcgctgccgaaaaatgaaaataccagcgaaactaatggtgttaaaagaccttctaccaaactggtgacaatcgctgtgaaggcactcccgatgacaaccccaacagctaagtcaatcacatttccgcgcaaaataaattctttaaattccttgatcataaacaaacctcctttaaatttattcttagtataacgaataaacgatgatttataaaaatatacgcccgtaaaatgagtaatttttctggaaaaattctgcattatgctataattgaagagatgatttttgagaggataagaggtgcattatggcaattgaactaaaaaaaaatgttcgactcacggttttgccgactaaaaaatataaaacaatccgtgtttttattcgatttacttcgcaattagcggctgaaacggctgcgaaacgcacattattgacgagtttattagagacaactagtttgcgttatcccactcaaacagcctttagtacgcaactggcagaattgtatggagcaagctttggcatgaatgttaataaaaaaggggatcttcatcaagtcaatgcagcgatgtcgttcgtcaacggaaaatatgttgctgatgaagaactatttacccaagctgtttcttttttgaaagaagtgctttttttcccaaatattgttcaagatgaatttgaatcaaaaaattttacgatcgaaaaaagcaatttgattgcttatatgagaagtattgctgaggataaacaggcgtttgcttcattaagcttacaagaattatttttttcaaaaagtgacaatcaaaaatttccaagttttggtcgtcctgaagatttggaagatgtgacggcaaaagaactaacagaaacatatagttctatgattaaagaagatgctgtagatatttttgtgattggggatgtcgaagaagatcaagtaattgaagttatgaaggatctcccctttgaaaatcgtcctgaaaaagatctttctgttttttatcgtcaagatttggaaaatattatccgcgagaaaatcgtcagagagcctgtgactcaggcaaaactgaacttaggttatcgtacgggtgtttattataatcaaccggaacgtttctctctcatggtttttaatggattatttggcggatttcctcattcaaaactatttatgaatgttagagaaaaagagagcttagcttactatgcatcaagtaatgtggatacatttcgaggttatttatctgttcaaacaggaattgatggcagtaaccgggatcaagtctttactttgattgaacaacaacttcaaagtttacaaagaggagaaattacagaggctgaattggcacagacaaaagctatgcttaaaaatcagtttttgttatcgttggatagtccacagtctttgattgaaacagaatatcttaatcagtgggtaccgaatactaaaatgagtgaagagcaatttatacagcgtttggaagaggtatcggtcacagatgttcaaaaaattgctcaaaagatcgaacttcaagccgtattctttttagataaggagcttgatcatgaataaaaaacattataatcaaataaatgaagtcttgtataaagagatattacccaatggattaacagtttatttattacctaaagaagggtttcataaaacatacggtctttttagtacagattatggttctatcgataatcattttggttatgcgaatgaaacgatgcatactgtaccagatggtattgcccatttcttagagcataaactttttgaaaaagaagacggtgatgtctttcaaaaatttgggcaacatggagcatcagccaatgcatttactagcttcacaaaaacgagttatcttttttcggctaccaatcaaattcgaaaaaatttagaaacccttttagattttgtacagatgccttattttacgaaagaaacggttgagaaagagaaaaggatcattgggcaagaaattcagatgtatgatgatgatcctaactggcaacaattttttggtgtcattaagaatctatatccaaagcatccgcttcacattgatattgctgggactgttgaaagtatagcagccatcacagcagaagatctttatctgtgctaccatacattctaccacccaagcaatatgactttgttcatagttggaaacatcgatccagaagagacaatgaactggatcagagaaaaccaggcagcaaaaactttttctgcagcaaaagaaattaagcgtcaatttccggaagaaaccgttcaagaaattattccagaaagtattatgaggatgcccgttacgcgaccaaaaggtgttttgggtatcaaagggaatatggagaaacgtccgacggaaggtcgggagttgctacgatataaacaatctttgaatttattgttccaattacttttaggtaatacttcagctaattacttaaggttgtatgatcaaggaattattgatgatacgtttggtttcgaagtaagtttggatcgaagtttttactttgctgatttttctggagatgcagaataccctgaagagatgcttcaagcggttgaagaaattttattgaattatgaaaatgatcctgaaatgaacgagaagaatcttgagttacttaagaaaaaaatgctgggtaaatattttcaatctctcaattcattagaatttattgctaatcaatttacacaaagcttatttggcgaaacaacactctttgatttgccagatgttatacgttcaatcacgctcaatgatgttcgatctgctgctaaagtattcattgatcaaaaagcattcagtcggttttacttgctaccaactaaaactaactgattaatcgtcattgtgtaagatgccgtctatgcattttctgatagatggctcttgtttttgtagaagaatgagtaatgagatcaaaaagtattaaattttgtttgcgacttgtctgaatgttatcctcagtcaattttttttatggtattctttaaatgatactgattgaacaattttcatttatgatgaaaaatcaagagtaaaaatgttatatttaataaacaacctatcaattaagcaatccaaggatgacaaggagaaacgaagtggatttccgatccaagtgtttgccttccataaaatgaatagtaaagactggagtagatgatcgagtggccaacgaaactacgattggagcaaaattacggcaagcccgtttagataaacatatttcattagatgaattacagcaaatgacaaaagttcaaaaaaggtatttggaggcaatcgaagccgatcgttttgaacaattaccaggaactttttatgttcgtgcatttattcgtcaatatgccgccgctgtaggtgaggacggagataagttagtttctgtatttgatggaaaagatacattggcagaaccactgcctaaaagacctcaacctgagaccgtaagcggatcgagaaaagctttgcatgtagaggaaaaaggcggaacgtttttatcccgctacttaccaatgattttattaggattagtagcagtcactattatctgtattgttgggtatatggcttggcaagacagacattcaacccctatgattcaaggtagttcggcaccggtggttgagaattcagcctatacatcaacctcaagcacggtggaatcgacagcaagcaaagaaacgagcgagtcagagactcaatcttctagcagcacagaatctagtgagaaagaaatgactatgaccaaaggggaatcttcccaatcagatatcagcatttcaattaaagatgcgacgaatccaattaaattagagttaactggattagatgcctcgtgttgggtaggcattcttgtagacaatgcgtatgtctaccaatatactttacaagcgggcgaagtccaatcgacgacattgccagaaaatgcaaccaatgcaaccattgtacttggtgcaagtcaaaatatccagattgcggcaaacgggcaaaaaattgatttcgatgatcctcagtataaattgctccaaaaaaatgtgcatttagcgattgagtatcaagaaacaaactgatcagaagaacgattaattagttagaaagataacattgttcctatggcaagtgctgtagtagcatgatttccgtttttttcgtacaatatttgtcagagaggagcaaattttttgaatttacctaatcaattaactgtattacgcatcataatgattcctatatttattttagttttggcgttgccaatcgatttaggaacattggacgttggaggcgtcgatttactcacaacacatctgatagcagccattctatttgctgttgcaagcattacggattggctggatggtaagattgctcgttccagaggattggttaccaattttgggaaatttgccgatcccttagcggacaaaatgctggtaatgactgcatttattatgttagtcgaattggataaggctccagcttgggtagtctctatcatcatttgtcgagagttagcagtcaccggtttaaggctcttgttagtagagcatcatggtgaagttcttgctgctgcttggcctggtaaaatcaaaacagcaacacaaatggttgccattattttcttatttattaacaatcttcctttttcactcataggcattccattggatcaaatcatgttgtatgtatgtttgatctttacaatttattctggaatcgattatttcattaaaaatgccagtgtttttaaaggttcaatgtaatttctaaaagttcagaggaattctgaactttttttgtaaaaaaaatcaattacaacgtagttgataatgaaggagtaatgaaatgaaggcagagattattgcagtagggaccgaattgcttttgggacaggtggtgaataccaatgcaactttcttatcagaagaattagctagtttaggaatcgaagtttactatcatagtgttgtaggggacaatccaaagcgtttggaagagctagtaacacttgccgagaatcgcagtgacttgatcgtattttgcggtggtctcggacctacagaagatgatttaaccaaacaaatcgttgcacagcatgtcggtcaagagctcgttcgtgacgaagcagggtatgagcaaatgctgacctttttcaaaaatggtcagcgttttatgacagaaaataatttgaggcagacgttggtattcaaagatggtacagcgttacctaatgcaactggattagcaatcggtatcttctaccgaacagctacagcggcatatctcctgttgcctggaccaccaagtgaactgaaacctatgtttatccaacaagcccgtccaattttgcagacagagttttcatcagaagaacagttgatttctcgagtattgcgattttatggaattggagaatccgcactagtaactgaacttgccgatctaattgattctcagaagaacccaacggtcgcaccgtatgctaaacccaatgaagtaaccttgcgtttgacggtgaaaactacggatgaatcggcaggacaagccaaactagatgaattagaacaacaaatccaagcaagagtgggcgaatatttttatggatatggagagcatacttcattagctgaagtagtcgttgatatgttgaaagaaaagaaaaaaaccgtgacggctgcggagagtttgacagcgggactctttcaagcgacgctgggagacatctcaggcgtgtcccgtgtattttctggtggttatgtgacttatgctaaagagacaaaaagtaagatgctaggaatcaatgaagacttgctaacagcttatggaactgtcagcaaggaatgtgcagaagcgatggcgcttgctgcccaagccaaagaaaaagcggattacgccctttcttttaccggggtagctggaccagatgagcttgagaatcaacgcccaggaacggtctggattgctttagcaaccaatgaaggtgtgaaaagcaagtgctatcatttttccagagatcgtgcatacgttcgtcatagtgcagtaatggcaggattagatctattacgtaaggaattgttaagatgatgcgaatgtttgttcgttttttcttgcatttttttaaaagaaggactattattaacatagtaattgacacacgaaagtgaagaaaataagggggattatccgtttggcagatgatcgtaaagcagctttagatgctgcactgaaaaagattgaaaagaactatggtaagggtgccattatgaaacttggtgagaaagtcgatcaacaaatttcgacgattccaagtggttcattggctttggatgttgctttaggtgtgggtggttatccacgtggacgtattgttgaagtatatggaccagaaagttctggtaaaaccacagttgctttacacgcaatcgctgaagttcaaaaaggtggcggaacagcagcctttattgatgcagaacatgcattagatcctcaatatgcacaaaaattgggtgtaaatatcgatgatttgctgctatctcagcccgatacaggtgagcaaggtcttgagatcgctgatgctttagtatcaagtggagctgtcgatattgttgttatcgactcggttgccgctttggtaccaagagctgagatcgatggtgagatgggtgatacccacgttggtcttcaagcccggttgatgtctcaagcattgcgtaaattatctggatcaatcaataagaccaaaacaattgcgatttttatcaatcaaattcgtgaaaaagttgggatcatgttcggtaatcctgaaacaactcctggtggacgtgcgcttaaattctattcgacgattcgattagaggtacgacgtgcagaacaattaaaatccggaacagacattatcggaaaccggacaaaaatcaaagttgtcaaaaataaagtagcgccaccttttaaagttgctgaagtagacatgatgtatggacaaggaatctctcaagagggagagttgcttgatatggcagtagagcaagacattgttgataagagcggtgcttggtatgcttataaaggagatcgcattggtcaggggcgggaaaacgcgaaaaactatatgcgtgaacatcaagaaatgatgatggaagtttctgctcgtgttcgcgatgcgtacggcattggtaccggagaaacggtcattgaaacagaagatgcgcaagaagaactaccattagacgaataagatcgtttaacgataaagaagaagccaaacattcaagtgtttggctttttttgtacagtaataacagatctgctcataaaaactgcacgttaaaatgaaacctataggaggtgagggagcgtcaataattttgtgtaaatgattcttccctactgcagattgtttctaattctcaatcagttggcttagcatttgttcaagttcgccttcggcctgttgaaagcctttatgactgcgacctaggaatttttggttgtaagtatcaaaagacgagactaagaaacgttccatcgactcttcgttttggaactgttccttgcggtggctgtatttcttgatttgcttattaaaggattcaatcaagttcgtagaataaatactcttgcgtatggccaaggggaaatcatagaaagtgagcaagtgatcgttcgaaagaatcgattcaaccacttttggatagctggttttccttttttccgcaaaagcaccacgtgcttccaacgccacctctttagatgaggcttgatacaccattttaaaatcatcacagacttccttacgatcatcgacacgcactttgtgactgatattacgggaaacgtgtacacaacaatgttgaaaacgagctttgggatagaaccgactaatcgctcctaccatcccctttaagccatccgtgatgaacaggaggacatttttcaaaccgcgctcttgaaggtccaataaaatttcctcccaaatcgtgatggattcagtcggtgcaatcgcatagctcaatacttcctttgatccgtccgggcgaatgccaactgcgatatgaatagcttccttggcgacggttttccgctttaacggaatatacgttgcgtccatataaatagcagcataacggtcatgaagctcccgccctttaaacgccgttacctcttctgtaaatgattttgttatattggacatggtttggggcgtgtagtaatgcccatacattttctcaatcaagtctgcgatttccgacatggtaataccttttcggaagaggtgaatgacggtctcctctaacgtgtcattcgtccgtctataagcaggaacagtctgttgcttgaactcaccattgcggtcgcgcggaatctggagatgaagttccccatactcggtcttgaccgtacggtcataggagccgttacgagaattacccgtgttaaaaccaatgcgatcatacttttcgtaatctaggaaagccgttaactccgttttgagaagcgtattgactgctttctccaaatggacacggaataattcattcaaatcgcctttgttcgctagagtctttagaatttctgtagtaaaatcgttcatagggaagtcctctcttctgtgaatgtgttgtggtagctctattctacagaagggacttccttttttctatttacacaaaatattttacactctcggaggtgatgtacataggatttaaagttgacactcttgtgtacaaacattagaataaacttatgtgggtttccacatagcagtaggcaacttgataatttattttaatttgtttatcaaaactacaaaatattgtaaaagatagtatggaggtggattcattggaactactttacattctcctcgctatcatcggtttaattgtcggtcttggattaggagtttttgtgaccaaatctcgtcacgaaaaagagatcaatggcgcgcaaaattctgcaactggaattatcgaaagcgctaaaaaagaagcagaaactctaaaaaaagaagcattgttagaagctaaggaagaaaatcagcgttatcggtcagagattgaaagtgagttgaaagaaagcaaacttgatttaaaatcacaagaaaatcgcttgctccaaagagaacaagtacttgatcgcaaagatgattctttggaaaaacgagagcactcactggaagaaaaagaaaacagacttagtgagaaacaacaattaattgacgagcgagaaaaagaagtagaaaaactaatcgatgggcaacagcaagaattagagcgtattgcggctttgtctagagaggaagccaaagagttgatcatgaaatcaacggaagaagaattgaatcatgaattaacgattatggtaaaagaatcagagcaacgtgcaaaagaagaagcagatcgtaaagcgaaaaacttattgtcattagcaattcaacgttgtgctgcagatcaagtatcagaaacaacagtatctgtcgtatcattaccaaatgacgagatgaaaggtcgaatcattggacgagaaggacgcaatattcggacattggaaacattgaccggtattgatctgattatcgatgacacaccagaagcagttgtactatcaggattcgatccaatccgtcgagagattgcacgaatgacattagagaaactgatccaagatggacggatccatcctgcacgtattgaagagatggttgagaaatcccgcaaagaaatggatgaacacatccgtgaatatggggaacaagcagcctttgaagtcggtgcacataccctacatcctgatttgatcaagatattgggacgtttacgctttagaaccagttatggacaaaacgtattgaatcactcaattgaagtggcaaaactttcgggtgttctagctgctgaattaggtgaggacattcagttagcaaaacgtgctggactgctgcatgatattgggaaagcacttgatcatgaaattgaaggctcacatgttgagattggtgctgaacttgctgccaaatataaagaaaatcctgtagtcattaacgcaattgcatcccaccatggagacgtagaagctacttcagttatctctgtgctggtagctgcagcagatgctttatccgctgctagaccaggtgcacgtagcgaatcgttggaaaactatatccgtcgtttacaaaacttagaaaatattgcgaatggcttcaaaggtgtagattcaagttttgctgtacaagcaggacgagaagtacgagttatggttaagccagaagagatctccgatttagatgcggttcgtctagtacgtgatatccgcaaaaaaattgaagatgatcttgattatccaggacatatcaaagtaacggttattcgtgaaacgcgagcaactgattacgctaaatagcataaaaaagaaccttggcttttaaagccaaggttcttttttatcaaatagtttagccctcgttagcaggattaaaattaatcaaagccgcctagtacttaagagaggttagatttttcttctgcgcgcaaagtctacaaatcgaaatttatctaagcgatgtatcgattcagtgtattcaaaacagcgtgtgtcttcaagataaaccaaactacgtacagtaacaacatgttgatcatcaggatgaaggtccattaaatctcttaattctttattgactggatccacggtaatttctttttgtgcataggcaatttcaagtccaagatcattttcaaagtaatcatagatcgagtcttgtgctcgacgttcaggcaattcttcaataatcgaagcatctaaataatctttatctagaatgacaacttcaccatcaatctttctttgacgtaccaatttccaagcttcagaagcaactggccaatcagtaataccatgtaattttggtgaaacggcgatcttacgaatttcaactacttttgtttcactaggaatacgttgagtatcttgtaattctttaaaactagttagaccagaaataggaaagtcaaaacgattcagatctaaaacgattgaaccttttccttgttttttttgaatgtagccagcattttttaaaagattcaaggcttttcgaaccgtttcacgagaaacactgtacattttgattaattggttctcactaggtaaaagagagtgtggcgggtattcgtttgacagtatcttttgttcaagatccaaaaatatctctttgaatttattcatgggattgcctcctcttgcctattatagcgagggcatttttgaaaagcaatcggctatttggccaataattcatcaattgaaagatccgtcagtttttcgacgattgtgtcagctccatgcagttcttcaccagaatagacaccaactgcatacatgccagctgccttaatgccatcaatacctgcttgggcatcttcaaaaccaactgcatcactaggtttaatgttcagcccttttgcagcttggataaagatttctggatctggtttacctttagaaagtgtggctgggtcaacgattacatcaaaatcctgcatgacacccaatttatctaaaataaatggcgcatttttagatgccgatgcgatagcacaaggaatccccttgtgttttgcttcttctagaaaagttttgacacccggaagaaggtcatccggagtcagactttgaagtaattgaacatagtgagtgttttttttgcttgctaaagcatctttttcttctgaactataagcatcatttttatttcctaatgttaaaatacgctctaaggaatccatacgactaatcccttttagttgttcgttgaattttaagtcgatttcaataccgatttcagcggctagttctttccatgcgatatagtgatatttggctgtgtctgtaatcacaccatctaaatcaaaaacaaacccttttttcattatgttactctcctttaatagttgatagattgttctttattggcttttaattcatgagtagcaccagaaagaatgatcgttgtattttggtcagctacaactgtcaatgtttcatgtgtaacattaaagtgataattaatacctctgacttgaatattaaattgaatattttgccattgcttaggcagatttggatcaatacgcatcacatcttcccgaaaatcgattcccgcaaatgtcgttagcggaatatagagagttgccgccattacacccgcatgaattccttcggcagtggttcctccttgaatatcgcggtaatctgaatagagagcctcttgatataaagaccaagcgagatcttgctggtcaaccattgctgccaattgagcatgtacaactcgagagagtgtagagccatgagaagttcttgccaaataataatgcaagtttttttctacataatcttcgggtaagcggtaagtaagatcatctaaaatttgatgcacttgcgctgttgaaaaattgtaaaaaatcattaggctgtcagcttgtttggcaactttgtatgcatcggcgctttttccttcagcatttaaaatacgatccatacgataaatgttcccatatttttctctataatgatcccagtctaagtcttttaaatcaaaatagccttcaaattgtgcaataattccttcgggattaatttctaaacataaatttttacgaatatcggtcatttgtgagaaattgtcctctgaaagctgcactttagctgctacactttgaaagatttctggtgaaagttggttgcgtaatttttccacttcttcaaacaaccacactaccatcatattagtatatgcattatttttcaacccacctttttgactgttgggatagctttcatgaaattcatccggtcccatgacaccttcgattgagtaacggcctgtgagagaatccaaagtagcagcactctgccaaaaatgagcaatttctaaaattaattctaaaccgtattgctccataaaagatcggtcacgaacgttatgccagtactgccatacattataggcaatcgctaaagaaacgtgacgttgcaatcggctatggtcttctttccactcaccactgataggattcaaatgaagttcttgtgactgttctgttccatctaaaccagattgccatggaaacattgctccttggtatccggcttctttggctgctttcttggctgccgttaagcgctgatagcggtaaagtaagatctctctggcggttttaggaaaatgaagaatataaaaaggtaagatgaataattcatcccaaaaaatatgaccacggtaagcctcaccatggagaccacgggctgtgatactagcatcaagagattgctcataggcgttgggtgctgctgacactaatagatggtatgtgtgaagattcagcattttttgtgacatgagatccccatcaatggtaatggctgcattctcccatagtttgcgccaagcttctttggattcagcatacatttctttaaaccgtggtagtgaaagaagtgccagcttgctagtagttgtttgttctcccatttgatatttagcaacagtaactgatttttctaaagtataagttctatttttctccacagaaattgttaatttttgaattactttttctgccgttttttctgattttaatgtttcaagagaaaagtcatcagaaaataattgtgatgcttggcaaaccgtaatgtcagactgatttgtacgggcaatgagtagagctttgctcttaaaatactccgttgtttgaatggtcaagtgcttgtttgtcaagcttcgatagcgtgcgacattataattgtagaccgaaccatctgcttcacttatcacgtcgatttctccggtaaaattaagtggagtaaagcggtaaaggatggagtagtgatgactatttcccatattagcaattttttgtgtttcaattcttaattgcttttttgtgtgtgtttcgatttcagcgaaggaggtaaataatccagtttttaaatttaattgacgcttaaaagataaaagtgtattttgtgcgatatcgattttttcgttatcaatgactaaataaattttttgcagatttggtgcattgacgaagtcctcatttgtaatggtacgatcagacacctctgactccgccgtattatagagacttgctaaataaatcccaggataattggcatcggaaatctccatttctggtgtagtaccacgcaaccctataaagccatttcctactgttaatagtgattcaacggagtactcatctttgccaggagtatagccataatattctaattgccaaggaatctccaaacgcttctcttcaaagctttcttcagttccacatacaaacgctcgatttaatttttcggttaaccattgatctaatgaaaaggttccttcttcgttagtaaagacgaatgagtcggaaaggattcctccctcttgattcttttccaattgtttctttaatgctgctattcgttcattggtggtccctgtaaacgtgaatatagcacccatgtggtcggccaatagccattgatcattagtgatctcaattttgttcacagtattctctcctttctacttgtctatacatgcaaaatgattataaccgatattgtaagctttttcaatttaataaggctgtttttttaaattattgtgtaaagttaaatgaaagtgatttgttttttttatttgctcaaagtttatttttttgaatgaaaatccttttgtaccaacaaaaataaagcatgttctgaatgattatttttcacaaatgtctttagtgaaaaaaatatagaatgaaacgcttgcaatattgtaaatataaagttatgattagcatgaaataaaaacatatatatacaagtttaaatggaaggggtttattattatggggaagtatcgggatgatgctgagaaattgctggagtatgtaggcggtaaagaaaatattgcagctgtgactcactgtgcgacgcggatgcgatttgtactgaatgatcagtcgaaagcaaacgagaaagccattgaagatattccaagtgttaaagggatgtttacaaatgctgggcagtttcaagtgattatcggaaatgatgttccaacgttttacaatgattttacagcggtatctgggattgaaggagtttctaaagaacaaagtaaagcgattgcaaaaaagaatcaaaatccgtttcaacgggctattgcagttttggcagagatttttacaccaattataccagctattattgttggaggacttattctggggttccgtaatgttttggaaggaattgattttggtagtggaacaattgtttcccaatctgtattttggagtggagttaatgatttcttatggctacctggggaagcaattttccattttcttccagtaggtatcacatggagtattactcgtaagatgggaacaactcaaattcttggtattattttagggattacattagtctctccacagttgttaaatgcttattctgttgctagtacagcagctgctgatattccattttgggattttggatttgcacaaattgataaaattggttaccaagcacaagttataccagcgatgttggctggttttatgttagcatatttagaaatcttttttaggaagcatataccagaagcgatttcaatgatttttgttccgttattctctttattaccaacaattttagctgcacatgttgttttaggaccgattggctggtggttaggagacattatttctaacgttgttaatacaggcttgacttcttccgtcagctggttgtttagtctgatttttggagccctgtatgcaccattagttattactggacttcatcatatgacaaatgcaatcgatatgcagttgatttcatcatttggtacgacaaatttatggccgatgattgcgctatctaatattgcacaaggttctgctgtattagcgattgtatttttacatcgagggaatgaaaaagaagaacaggtttcaattccagcaacaatctcttgttacttgggagtgacagaacctgcaatgtttgggatcaacttaaaatatgtttatccatttgtagctgcaatgattggttcaggtattgcaagtatgtttaataatttaatgggtgtgcgagcaaatgcaataggagtcggtggattacctggtattttagccatcaacgcaacagaaggcggaggtttgttagcttttgggatggcaatgctgattgcaatagttgtaccgtttattttaaccatagtttttcgccgtcaaggaatctttaataaaattgattcagtcaatagtgttgaagacaatgcgtatgcagaaggactggcaacagcaggtgcaagtgctggtgtagcaaacactccatctcaaactatttcaaaagagactactgtaactgaggaaatgctttatgcaccggcagatggtcaaatcattgcaatcggtgaagtggaagaccctgttttttcacaaaaaatgatgggtgatggctatgcagttcgtccaagtaacggaaaaatctatgctcctgttgcagggacggtttcaagtatttttgaaacaaaacatgcaattggaattttgactcctggtggggcagaggtcttagttcatatgggattagataccgttgaattaaaaggcgcaccattcactgtcaaagtgtcggaaggtgatgctgtcacagtagatacattgattgctgagatggatctagaagctgttaccaaagctggaaagaaaacagatgttgttacggttcttacgaacgctgaaaagatcaatcagctgacaatcaacaaaaccggcagtgtacacgcgcatgatcgagtaggggctgctgaagtccgctaaataaaaaagagtaggctcatgaaaggaagctatcattccattcatgagccgtatttttttgttttatttttcttaaagggttattttgtttggcgtacacgttctttataaaagtagcgcaaagttagaaatacgactagcaatactagcacccataggaagaataaagcgatttgtgaccctaaaattgttccggaaatataatcgggacttactttttgagcaaggtcgatcattgtcgcaactaaagctgttgcgacagcgccagaaaattgttgcagtgtgttgaagacggcatttccatcggcggccaaatgttggtcaattttacttaaccccatagtcatcatattgctatacgaacaaccgattccgatcatataaaagacatgggcagcaataaacgcccacaaaaacgtcaggtgcaatagcaaggccaacgctaaccagccaaaagtaatcaatacaagaccaatcataatcggttttttaggtccgatgctatccaacatacggcctgaaagaggagctagaacagcacctacaatcgcaccaggcaacataaccaatccagcagtgaatgcgtcctgaccaaggactatttgaacaaagtttggcaagacaaatgagattccaagtaaaagaaactgacagacaagaaatccgaataagaataatcggaaagaacgatttttgaatacagataagcgaatcaaaggctcagattgcaaggaacgtttatagaaaagagctgcacctaaaataccaagtgctaatggaaatatgctcgtaagagaaccaatttggtttaagaaaagcaaaaagccactaaacataaaagtgatacccaaaacactccacaaatccagacgaccagttttttcaattgcaattttaggtattgaataaagacctaaaaccaatgagaccaataagacgggtattaagaagaggaaaatgtagttccaattcaagagagaagtcaataaacctccgtaagtaggaccaatcgccggtgcaattgaagtagttaaatttccgattccaatcatagttcctcttttttccaaaggagagtacgtaaggatgatatgaaacatcaacggtaaagcaattcctgtacttgccccttgaagtaaacgaccaagtaataggatagcaaaggaaggggagaggaaatcaatcagtaatcctgctaaaaacaacccgttagcagccaaaaataatgttcgaatttgaaattgtttcaacagaaaagtagaaattggtacgatgatcgatatcaccagcaaatagattgttgtaacccattgcacatttgaagtagaaagattgaattgattaatcaaagtcggaaatgttacattcatagctgtttcgatcaataccccagcaaatgacataataccggttgctataatagcgcctaacaattttatttttttctccatattatcacctctaaaaaaattcataaaaaaagagccagtttctaaataaatagaaaccgcctctctctcgacaagcattactgcttgttatctgtacgatttaatctaaaagctattgtactgacttctttttgaagagtcaatagaaatgtttgaaaaataaaactgaattttatttgaaacttttcaaaaaaatccttacaccaaaatttttattttgttagaataatcaagtatgtaaaaaaaaaaggaagttttaaatgccgattaacaaaaaagaaagtttgatctatacgacatttatgtgtttttttatggtgtacttcatgagtgtctacaatttaatgtatgaggtgggaattactgcaatagcttttcaattggcttggaatgaactgccatttgctatatgtattgcgtttattttagattggtttattgtctcaggtcctgcgaaagcatttgctttccgttttattgaaaaagataccccagcttggaaaaagattggtctaatctcatcaatgatgattgctggcatggttttctttatgtcactttttggtgctgtaatgcatccgaatgtaaatcaaggactattaatgacatggttatctaatattggtaagaatgtagttgttgctttaccgttacaattattgattgccggaccaattgtacgacgattatttagaaaattatttcccataggtacggtacaagaaattcaatagaatttatacaaagggccacttctgaggttgaactcagaagtgactttttatctaaatatatttgttaaataacaaacaaaaaacaccataggatggtatggcgtttcttgtttaccctataaaataggatacaggatgtacttacataatagtatgcataggaagaaaagtatagttcaacaatttcattgctcggtgaaatcattgctttgaacatattttaatctgtaaaaaaattgaaaagttggtaccaaggacggtcagatacgatgtatgcttcaggagaaaaccctgatgatgcataccctaaaaaacaaatgaatagccctagaaaaatgaatgccccgcctatcattagtagcaaacgtttatttattttgatcatcttaccacctgcttttgaaagtttttgtataacgctttaggcaaatgaataaactgttgcgtccaacctaagatgggtttactaagcatataagtaaaaatcatacatactaaccctattccgaacatcgtgacgcctagacctagctgggtgatagaaaagtgaagaccttgagatagtagtaaagggcttaaaacaacacttgcaatgccgccaatcagtgaagttatgccaataacacttgtactgaatggaaggcaccaaataactatcaaaccactaagcatcaacaatagaacggttaacagtaagcttccccacagaggaaatcctagaaaaattatcactaataagaatggatgaaaacgccgaggaacttttacgacaatttcttcggcacctaatgcactttgagcaatactttgaggagtccctaatctggctacagcttcaacttcagagagtccctcttccatcaaatcttggatcatttcatcataataatcaataagatgatgaatctcacttggtttggtcttataggctaattcagctgctaaacttttaataaatgttatgcgatccatgtcagttgtctcctttaatataatgatgaattttttctaaatgaggccaatcaatagtcaaaaatttatggatactattttgaccatgagcagtgatttgataatattttctcagccggccattatgttcttttgaataagtcgaaacttttttatttgcctctaagcgtttcaagatagggtataaagttgattcagagattggcaatagaggagcaatatttttaacgatttcatatccataagagtctcctctttgtaaaaaagctaacacacagaattcgataatcccttttttcagttgactatccaatgactacaccaccttatacataatactatataaaacatagtatagttttgcaagtcgatttgtggaaatcagtctcaagacgtagtaacttccaggttgcgcctattttttttgcttccagtcatttttccttacttaaaattcatcgtacggtgaaaatattgattattttatattagattcttttggtaaagtattactaataaaaagttgttaggattttagacaaacgtatagttgttgtgttaggtaattgctgttggaaaagttgcttgataaaagacacacgatactcagtccagctacgaaagaagttagtaagagagtgtgtgtttatcaggaaaggagttaataatgagaaaacaaacaatcacaaagaaatatttaatcaataggttacgcagtcatttagaagaatatttgtatactcccatcactgttagaaaaattgcgaaatatgcaaagatttctacacaaccgatctatttgcaattttcgaatatgcaaaattataaacaggcaatgattgatgatgttttggcagagattcacgagctttctttgaaaaaggagatagaggatgatccattgtatacgttttggcttaactattatttgtttgccagccaaaataggaacttattttttgcgttatttttgaatgatatagggtgtggttcctatttaagagatcaatcattgtcattgtttatagagacaatggctgaatccgaagtatatcaaaaagcaaattgcgaagacattgaaaaattgcataatgaaagtttgattttcttttctggtctcgttcttacttatgtacggggagagaatatgcaagcaatagaagaatttttacaagatattaaagactatttttatcgtacactgattgatcctatgtatatttatcgagaaatattaccacaatcagtcatcgaagctggtttttaaaataacgataaactgttttttaatttttttcattacttgataggcttcttgctttataaaaattcttggctcattcattttcttgtaaacgaatagtatgggtttattgttggcaattttcaagaaatatgagaaggtagaattagcaaaaagtaaggtgttttatgactaaaaagaaacaagtgatggaggaatcttgatgggtcaaacagataattattcagataaaaaagctcaaatcgatcagcgaatctgttttttggaagagcatacttaccaaggaaacgaccttggcgtaacctttcaagagcatgcgataacctttaaatgctggacgccagaggctgatgcagtttcagtcattatttatcaaagcggagaggttaaagacaaggatcgtgtgatgacagttccaatgaagcaagaaaataattgttggaaggtcacagttacggatgaagtcaaagaaatgttctatacgtttgaaatccagcgaggacaagagaaggttgaagtggttgatctttatgcgaaagctgtcggtctcaatggggatcgtggggctatcgttgatttaaaagaaacggatcctgagggatggtcgcagacagaatgtgttggccaagatacgattacagacgcttacatttgggaattacatgtggaagatttcagtagttctaaaactagcggcatctcagaaaaaaatcgtggaaaatatctagcgtttactgaaaagaatacgcatcttgaaggagatgaaaggcagccaacagggctcgcctatttgaaagagcaggggattaactatgttcatctgttgccaatctttgattttgataatgacgagctgtctacagcctacaactggggatatgatcctaagaattataacgttccggaaggaaagtattcttcagacccgaaggatcccaaagcccgcattcgggaatgcaaacaaatgattcagtctctccatgaggaatctattggtgtagtaatggacgtcgtttttaatcatactgcagtcacagaatcttcttggtttaataagactgtgccaaactattactaccgtaaggatgaagaaggaaatttcgctgatggctctgcctgtggcaacgaaattgcctcagaacgtaaaatgatgcgcaagtttattattgattcaatcctttattgggctaaggagtacaaaattgatggatttcgttttgatttgatgggactgatcgatgtggagacgatgaatcaactgcgtgcaagcctggattcggaaggtttctctcatgttattctatacggagaaccatgggatgccggcagcaatcgtatcatccagccaaacatcccagcgaataaaagtaatgtctgggcactgtcagaaggcgttgcggtttttagcaatgatttaagagacagtatcaaaggtgatgtctttgaagaaacagacggagcttttattcaaggaatgaatggtcaaccgcaagtcaagcaaaccttttatgcggcaaatttggcaacggcgattcaaggaaatacgaaagttgctgaacaagaaggcgccgagcgctgggcaaaatctccccgccaagtgatcgcctatgcttcagtccatgataatttgaccttatgggacaaactggtggcaaccatgcaggcttcagcgaaggaaagaaattatgattttgatcctgagcttttagcccgcaacaaactagcagcagccattttgtttactagccaaggagcagtattgacccaagcaggcgaagagtttggccgtaccaaacaaggagacgaaaattctttccgttcaccgatagaaattaatcagctagactggaaacgcgcacaaacttttaatgagttgcggtcattttatcaaggtatgtggcagatccgtaaattctatcctccattgagagatgccacgattcgaacagctgaaagtattcagtttattgagagtaacaatgaaaatttccttgcatatattattccgaataatggttacaatgatacatggcaatcattagctgttttggtgaacagcagcaataaagacattttggtaaatagggaagaattcaagcaagagaaatggtggatcgttgcagataattttggagcaggtatagagccacgtggagagatcgtgaaggaaatcaacatcgctgccaaaagtcttttacttttagctaaatagttattttatttttaaaatttttaaattaagaagaaagttaaattgtattaaaatccatatttaatggattttaatacaaccattacgaatgtttataaagtgataggaataattttctgttatgagagaagtacaggtggaccataacatgaacagtttaaaagaaaccgattttatgatgacaatctgactgcttaatgctatagtaaaaacagaaaaaccaaagttggattgttactgactcgatcaggcaaaacctaaatgagaaaacgctctttgtagcggctcttatttaggttttttatttttttcgggtatttcttagaatgttaagcagcaaagttattgtttcagttacttgcaaacatatgactttgttaaaataaattaggcaaaggagaacgagcaaatggcaaaatttccagaaaatttcttatggggcggcgcgaccgcagcgaatcaattagaaggggcgttcgatcgcgatggcaaaggcttgtcagtggcggatgcaatgcctggtggcaaacagcgtttagcgattttaggcagtgatacgtttgattggacgatcgatgaggacaaatacacctatccaaatcatcgcgggatcgaccattatgaccgtttcaaagaagacattgcgttgtttgcggaaatgggcttcaagagctatcgtttttcaatcgcttggacacgtatttttccaaaaggtgatgaaacgacaccgaacgaagctgggttagcattttacgatgcgttgattgatgaatgtttgaaatacgggatcgagccagtggttacgatctcccactatgaaatgcccttgcatttagccaaagaatacggtggctggaaaaatcgagcattgatcgatttctatgagcgttttgcaaaagtcgttttggaacgtttccatagtaaagtcagatactggatgactttcaatgaaatcaattcagctttccatttctccgcattgagccaaggaatggtcaacagtacgggtgctagcgactttacaaacgtgatccaagcgtggcacaaccaatttgttgccagcagtaaagcagtaaaaattgggcatgaattgaatcctgagttacaaattggttgcatgatcatttatgcaacgacctatagcattgatgcaaacccagtcaaccaagtagcaacaatgacccataaccaagccttcaactactactgtgccgacgtgcaagtacgtgggaaatatccagcatttactgatcgcttgtataaagagcatggggtcaagaaggaagatcttgatattaccgaagaagatttagtattgattgctaagtataccgtcgattatattggatttagctattacatgtcttctgcagtggatatcacaacagaagaagctgatgaagtacaaggtaacttgttgggtggtgtccgcaatccattcttggaagcaagtgaatggggctggcaaatcgatccagaaggactgcgcattgcgttgaatgaattgtatgatcggtaccagaaaccattatttatcgtggaaaatggtttaggagctatcgatactattagtgaagatggcaaaatcgaagacgattaccgcattgattacttacgtcgtcatatcgaagcaatgggtgaagcgattgaagatggtgttgacctgatgggatatacaccatggggatgtattgacctcgttagcgcgtcaaccggagaaatgagcaaacgctatggctttatctacgtggactttgatgatgaaggcaatggcacaatggatcgatcaaagaaaaaatccttcgattggtataaacaagtgattgcttcaaatggagaagatttagcgtaagattaatactcgtttttttatagccgcacaacacggattatcgttgtgcggttattttgctgaaaaaatagattgtctgaatagagtaaaaaatctaaaaataatagataacacatcataaaaattttaatcagaaaaactttaataattgcacttggtaagcggaataaaactaaattttctaagaatggctgactctttctttccaactaaaaggggaccaacatatttttgatgatatggaaaattttgcaaatttagaagggcgttgtggttttcttctgaaatgtttcacgtgaagcatttttacagaagatagttacatcaaatgcaatattttcgaaaatagcgactctattttgtgaagcggatgagtttctcttagaacgtttggattaataaaaattatttcgagccgattaaagaagtaagagaacggagtaggaaaaattgtttcccctcatctattcgaataattggtctttaccatatgatggtgataagattaaaacatagaaatgtagagcattttgtttgtgaaaacgtttcaattttaaagaatggagagtaagcgattaaaaaataaaaatagtaggcaagttacttcttttttacttaagagaggagtatattcgtatttggaatttttctttatttagaatgattttaatgtatttttttagaaatagggggatgtaaaatggatattgtaacattagcacgaatccagttcgcgatgacgacgatttttcactttttctttgtaccgttttcgatcggaactggtgtcgttgttgcaatcatggagacactttatgtgatcaaaaaagatgaaaaatatcgccgaatgacaaagttctggggaaatatttttctattaagttttgtggtaggagtggtaactgggatcattcaagaatttcaatttggaatgaactggtctgattattctcgttttgttggggatatttttggtgctcctttggcgttagaagcattgctagccttctttttggaatcaactttcttagggttgtggattttcacatgggataaagtcagccctaaactgcatatgacgttcttttggttagttactattggctcgatgctctctgctttctggattttagctgccaatagttttatgcaacatccagttggatacacattgaacaatggtcgtgctgagatgactgacttcggagccctgctagctaacccacaagtctggtatgagttccttcatgttattactgcagcaattgccatgggaggaattctgattgcaggaatgtcagctttccaattgttgaaaaaagacaagaaagttgaccgtgattttttcaaaaaatcaatgcggatcggttttgcagtagctttgtttggttcaattacggtgttgatcgcaggtgacgaacaaatgaagtatttggttgaagaacaaccaatgaaatttgcagcaatggaaggtacgtatgaagataccggagatcctgcggcatggactgtagttgcatgggcaaatgaacgagaacacaaacgggtttttggtgttgagattccttatatgttgagtatccttgcatttaacgaaccatctggttcgattgacggaatgaacacagtgaatcaagatttgatcgaacgttacggagatcggaactattttcctccggtcaacacattgttttggagcttccggatcatggcaggtttcggtgcattgatgttgttggtttcttcattggggttattctttacgcgtaagaagaagccttcgctatttgagaaacgttggatgctttgggtagtggctataacattatttaccccattcattgcaaatacagcagggtggctgattacggaattgggtcgctatccatggacagtctatggtttatttacgattgaagatagtgtttcgccaaatgtatcggcaacttcgcttgttatctcaaatattgtttactttgttcttttctctggtttggcattaacaatggtttatttgattcggcgagagttaggacatggtcctgaaaacaaccagatggaaggaacgctgcacgaagcagaagaagatccatttgataaggaggcgtttgaaggatgaccggattgcaactaatgtggtatgtattgattggcattttgtttgccggcttcttctttttagaaggatttgactttggtgtggggatgtctgtccagacattgacccataatgaacaggaaaaagatcagatcgtgcatacgatcggaccagtgtgggacgggaatgaagtttggttgattaccgcaggtggcgcgatgtttgcttctttcccttactggtatgcctctttgttcagtggttattatttgattttgttattgatactagtcggattgattatacgcggtgtctcctttgagtttcgggcaaaaatgcctgaagaccgtaaaaatatgtggaattggacattaaccattggcagtacattggtgccttttatgttcggactcttgtttacaagtatggtccaaggcatgccaattgatgcagagggaaatatgtctgcgcacttcggtgactacgtcaatctcttctctgtagttggcgggattgccttaactttgctttgctacttacatggattgaattatattgcactaaaaactactggtccgatccgtgaccgtgcccgaaattatgcgagtgccttttatggtgtgctatattttggtttggtggcgtttgccgcgctactttatttcaaaacagatttctttgaaaaacattttgcttcgacgcttcttttgctgattgtgattgtggctttgacgctgatagcgaatatctctgtatttaaagggaaagaaatggtggcatttattgctagtggtttgaccatggtggcgctagtcggattgttgttctctggtttgttcccacgagtattgatcagctcaatcgaccctagttatgatttgttgattgcagaagcttcctctagtcactacacattgaagatcatgagttatttatcactgacaatcttgccgtttgttttggcttatacagcatggacctactatattttccgtaaacgaattagtcatactgagctgacggagggttattaatgatcgacaaacaaatcatagagcttcccggaatgaaacggttaatgggattgcttgcaggactttctttcctgcaagctctcttcatcattggacaagcctatggtcttgctagtgggatcactggattatgggaaggacaatcgttagaagagcagtggggctggattctactgttcttttgttcgtttttaggtcgccaggccattgtttattttcggacaaagaaattagacagctatagttaccagcaagctactgaattacgtaatcaactgctagaaaagatttttcgtgtaggaccacaaatcgttcagcaacaaggtaccggaaacattacaacgatggtattggaaggcattagtcaggtagaaaactatttacaacttattttggcaaaaattatgaacatgtcgatcattccttgggtgattttggctttagtattttacttggattggatctcaggtctggttttattgctggtttttccactgatcattatttttatgatcatcctaggctatgccgcccaaagtaaagctgaaaaacaataccgcacatttcaattattgtccaaccactttattgattcattacgtggaatcgacaccttgaaactttttgggatcagcaaaaaatatggaaaaagtatcttcgcttctagcgaacgttttcgtaaagcaacgatggggtcgttgagagtcggaattctttccacttttgcattggattttttcacaacattgtccatcgctgtggttgcggttttactggggctgcgtttgatcaatgaagaaatcttgttatttccagcactaacgattttgattttatctccggagtattttttaccaattcgcgatttttcaagtgattaccatgcgactttagatgggaaaaatgcaatgaccgctgtatctacgattttatctgagccagaagcagccattgatccagtaagtttacctcaatggcaagctgattcgcaactatcgattcattcgttatcttttgattatggagaaaagtctgttttgaaagatattgcattggaggtccaaggatttcaaaaaattgggatcattgggatgagtggctctggaaaatcaacgctgatcaataacttaagcggctttttgattccgaaagaaggcgaaattacttttgatggccaaaaaatgactgcattaagacagtcggattggcagcagcaactagtttatattccccaaaacccctatatctatcggatgactttgcgagaaaatgtggctttctatcagccaaatgctactgaagaacaagtgtggcaagcaatcgaagttgcaggtttaacgaaattagttcaagaattgccgcaaggaatcgatacaatgctaggtgaaggagaacgccatctaagcggtggacaggcgcaacgaattgcgttggctcgtgctttcttagaccagcatcgaaaaattttattatttgatgagccaactgcccatttagatattgaaacagaagtagaattgaaagaacggatgcttccgttgatggagaaccatctagtcttctttgcgacacatcgcttgcactggatggaagagatggatcaaatcctagtaatggatcaaggcagaattgttgagcgggggacattggcagaactgcaagcaaagaatggcgctttcgttgcgttagtcaatgggatgaggagggaacaacttgaataaaatcggtctctggcgttcgctaaaaacagatacctgggtcaaaccctttctttcaaagtacaaaaaggttcttgcagcagcgctgtttttaggatttatgacattcttttgcggaggcgcgttaatgtttaattctggctatctgattagccgctctgcctcaattccagagaatattttgttagtatacattccaatcgttctgacccgagcattcgggatcggccgaccagtttttcgttatgttgaacgactgacaagtcataattgggtgttgcgaatgacatcgaacctacgcctaaaactatacaatgttgtcgaaaaagatgccgttttctttaagcagacccatcgaactggcgatattttaggattattagcagaagatatcaaccatatccaaaacttatatctgcgaacgattttccctacggtgattgcttggttattgtatacttttctgattatcggattagggtacttttcgttaggatttgcattggtaatgttgctgttgttgggaataaatgtgtttgtgctgccgctctggtccgttgtgatcaatggcgctcgtcaagaaaagcaaaaacaaatgaagaatcaattatatacaacattgactgataatgtgctaggagtttctgactgggtattttcacagcgaggagcagaatacgtcgatgaacacaagcaattggcggcaaatctacgaagcgttgatgagaaaatcaatcgttttgatcgaaaaagagatttccttttacaagtgatcttcggggtgattacggttgcgttgattgtctggacaagtcagcgatttcctggcgagcacggtggcttagctaattggatagcagcatttgtcctttgtgtctttcctttggtagatgctttcgcaccattaccttcagcggcacaagaaaccaatatatacaaagattcgattgatcgttttaatgcattaccagaaaaagaggaacaaaaacggacagcatcagctataagtgcaccgttcaatttagaagtgaatcaggttagtttccattatccatctgaaaaagaggtactaaagaatcttagcttaacgattcctgcgcatcaaaaactggcaatattgggacgtagcggttctgggaaaagtacctttgcttctttgctcaggggagatttattgccgacccaaggtagtattaccttaaatggtgagccggtagcaagttttggtgaagatattagcgaatggattggagtcatcaaccagagtccttatttgttccatacaacgattttaaataatttgcggattggtaatgaagaagcgtcagaagaagaagtttgggacgtactgaaacgagtaggcttatcagagatggtgacagctctgccagaaggtttgcgaaccatggttgatgaagcagggttacgtttttccggcggtgaacgccatcggttggcattagcgcgaattcttttgaagaaaacaccgattattttattagacgagccaactgttgggctagatccaatcactgagcaagctgttttggaaacttttttcaatgagttggaagacaagacgattatttggatcacccaccacctgcaaggaatctcactgatggatcaggtcatttttattgaggatggagaattaacgatgagcggtacgcctgctgagttagctgtcgaaaaccaacactttcaacagttattagctattgatcaagggcgactgtaatcaaactgggacctttgccaagacaacaaaaaaatcggctagtgatcgacatgaatgtcggcttagtttttgaggagcattcgctcctcaaaacacttcactgtttacccgattggttcgtttattttcagaatagctttcagttgcggagggtagaataaagaatgatcaataatttcgttgcaaaagcagttgcgttagctcgcgaattttttctttgctaggggtgttcggcagcagttcgatgtcggctagtgctttttcggtataagaaacagcaaaatcggtggctttttcgacgccatgataacggcgcactaattcagcaacctctgtggcctcctcggtggtcaactcgctttttttggacagatagctctcaaatgcggcaggattttgttctttagcaaagagcagaggtaatgtatagacaccttgtgccaagtcttcaagaacgggttttttcaacgttccagaatctgctgtatagtccaaaatatcatcaaaaacttgaaaagcgatgccgatgtttcgtccgatctcaccagcccgttcttggttttctaagtcgagaccgccaaaatgagcaccttcgatgcaggccagccagaataattcggcagttttaccattgatgctttgtaagtaatcagcaattgattcatctatattgtagcgtgtgtgcatttgatctaattctcccagcaaaaggcgtttcattgcttgggcatttgtagccaaaaaatgagagccattcatgctctcgatcaataactcaaagaattgggtgaagagcaggtcacctgtgtaaacagcgatatctttgccatattttgcttggacagtgatgcgtccgcgacgcaacggcgaatcatcaatgatgtcatcgtgaatcaaggttgccatatgtaagatttctaatgaagcagcaattttggttaattgatcatttctttcatcaatgggttcgcctagatcagcgaataagaaaaataatgctggacgcagcatttttcctccagaataagtaaaatcaactaatacatcttgtatttctttgttacgaacagttacgcgttcttcaatgatcgaacagacagtttttagtctttgctcgatcgaaggataatcgatccaaaaattcaacatattaaaaccctttctaccagtcattcagcccttattctaacttaaagggagtctattgactagttaagtgcatttatcaaaaggagatgagtatttgacactcccagtatttctggagcttgtggaatttaaagcgaaaacagccagtgtcctcccattttttatcggaatttgttacagctggtataactacggctcaattcatttaggttatgtggtgttatactttattgctatgctgatcttcaacatggcagtagatattttagataattataacgattaccatcacgcaacagaagttcatgattacaaagaaaaaacaaatattatcggacgcgagcagctctcgcttccattcgtttttcgcttaatgatcggtatgatcgtcgtttcggcggtgatgggtatcgtattggcctatttcgtcggttggcccttgttttggatgggactttattgttacttgattggtatcttttactcatcaggtccgcggcctttatcgagtttaccgctaggtgagtttttttcaggatttacgatgggcttcatgatttcgttgatttgtgtatatttgaatacttatgaaacctttcaatggaatagcgcgaccttgggtggaatatttctaatcgcactacccaatacactgtggatcgctaacttgatgctggccaacaacatttgtgatttggaggaagatgaaaacaacaatcgttatacattggtgcattatttaggaaagagtcaaggattacggctatttgttcttttgaacattattgcatttgtagcgatcttgacagcagtggttctgcatttagcaccatggacgatgttgttgacgtttctcgtcttaccatttgtctggaaacagacaaaactatttatgcataaacaaatcaaacgcgaaacctttgtctgcgctgtaaagatccttgcggtcggagcatgtgcgcaggtcattagttttgcgatcggtttgattttataattttttgaaggaagaaaggaagtaataggaaatgaaggaagttgtcattttaggagcaggctacgcagggttgcgagcattgcatgtattacaaggatcaaaaggtgattttcatattacattagtagataagaatgactaccattatgaagcgacagatttgcatgaagtggctgctggaacgcagccaagagagcgaattagttacgatatcgctgatgtggtacgaccacaaaaaacaactttcctacaaaatgaagttgcaacgattgaccgtcaaagtcaacggatcatgtttacggatcaaacatctctttcctatgattatttgatcgtagcattaggatttgaatctgagtcatttgggatcccaggtgttaatgaaaacgcattggaaatggtagatgttgattcagcagaaactatttatcatcatttattgaaacaaatgaaagaatacaaaaaaacacaagatccagatttattgaaaatcgtcgtatgtggggcgggattcactggagtagaactcttaggttctttagtggaaaatcggaaggaatttgctgagatcgcaggtgtccaatcagaagaaatcaaactcttttgtgtagaagcagttacgcgattattaccgatgtttgatgaaaatctgtctgcctatggaatcaataacttggtaaaatggggtgttgaatttctaacaggaaaaccaatcaaagaaatcaagcctggagtagttgtttatcaaacggatgctgaaacgggtgctacagaagaattgtctgctaaaacgatcatttggacaacaggtgtcagtggaagccatgtcatggcagattcaaattatgcggctcgccgtggacgtgtgatggtcaaccaagatttaagtgatccagagcacagtaatgtttttgtagtaggggatgtttcagctgtgatggatcctgcaacaaatcgcccttatccaacgacagcacagattgctttgaaaatggggtatcaatctgccaaaaactgtctacacttgattaaaggtgaaaaaacggaagactttcattttgaatctttaggatctgtagcctctattgggaacacgcatgcctttggtttggtgggtaaaatgcctgtaaaaggttatccagcatcatttgtcaaaaaagccatcatggaccgctccctgttcctaactggtggggttaaagaagtgttagcaaaaggccgctttgatttttatcattgagtcgtgcgctattttttcaacttaacattaacagaagcaagaagagaacatgtaccgatggagatagtttaattataagtaaaatagacagagatgccgattcatgttgggtgtttctgtctatttactactatttcagtttttaacaccatagggcgtaaggcctttattgaatctctagataaatgatcaggttttgaagagaaaacagggtaagaaaaaacccccttttgtacctttattaaaaaaatgttaaaataaagagactatgtttgttgggaggcatgaaatgacgattcgtaaagaaagacgccgtttagaaaaacgattgaagcgttcattattagcaaaaaaagggttgacgatggctacaactgtggtagccggttcaacgattgcaccaaatttggttttagctgcagaaacagcgacttcagatgatgcaaaaaaccaagcagagatcacagaaaatcaagtatctggaggaaatagctccactgattcaactggagacagcattcaaagcagtgctgacgagacgatttcgacagaggaaacaacagaaccaactgttcctattgaagagcagcctgttacaacacctgaggaagcggcaacgccacaggaaactatcacggaagatacagcggtcgttgagacgccaattgttgctgcacctgcgttagcaagaacctcgatcttctcagcacgtgctgatacgagtggatttattgcgaaagcaagtggttatgcaacagaagtagctgccgctaatgatctctatgcatcagtgatgattgcacaagctatcctagaatccggctggggtacttcgactttgacgacccaagcgaacaatatgtttggaatcaaaggaagttataatgggcagtatgtcgaaatggcaacattggaagataatggttcgggcaattattatcaaattatagcgaagttccgcaaatatccatctttaagagaatctttccaagataatgcgtatgtcttacgaaataccagttttgctgccggtagctattattacagcggtgcttggaagagcaatacgagatcatatacagaagcaacggcatggctgcaaggacgctatgcgactgatacttcctatgccagcaaattgaacaatcttattgcaacgtataacttaactcaatacgatagcggcagttccgctgggaacggtgacatgaataatgttgagacccctgtaggagaaaacgcgattcaaaagcaaatgaaaacgactgcatctatgaatatccgttcagatgcgtctactacagcagcagttaccggctcacttactgcgaatacaacctttacggcagttgcggtcaaaacaggaacgagcgtcaatggcaatacaaattggtataaagtttctggcaaaggctgggtcagtggtgcgtatttaacagaagtaaattctggttcaacatcaggcaatgcaaatgataatactgtcaatactggaatcaaccaaaagatgaagacgactgcgacattgaatattcgttctacagcatcgacgagtggcagcatcgttggctcattgagtcaaggcagcactgtgacagcaacggcagtcaaaacaggaacgagcgtcaatggtaatacgaaatggtactatgtttctggcaaaggctgggtcagcggcgcgtatttaacagaagtaaattctggttcaacatcaggcaatacaaatgataatactgccaatactggaatcaaccaaaagatgaagacgactgcgacattgaatattcgttctacagcatcgacaaatggcagcatcgttggctcattgagccaaggcagcaccgtaacagtaacagccgtcaaaaatggtactagtgtcaatggcaatacgaaatggtactatgtttctggcaaaggctgggtcagcggcgcgtatttaacgagtgactctagctcatcgtcgaatacatcgaatacaggtgattcgatcaatcaaaagatgaaaacgaccgcgacattgaatattcgttctacagcatcgacaagtggcagcatcgttggttcattgagccaaggcagtaccgtgacagcaacagccgtcaaaaatggtactagtgttaatgggaataacaaatggtactatgtttctggcaaaggctgggtcagtggtgcctatcttacgaagaccgcgacaaatgcttcttcaagtaatagttctgccaataatagttcttcgactaaatatcataccgttaaatctggggacagtctgtggtctcttgcgcaaaagtatggtagtagtattgaccaaatcacttcatggaatcgcttgtccaataatatcatttatgttggtcaaaaattgatcgtgaaatagtgagacacctgatttcatgcaactcaaaagaaaatcaatcagcattacccgatacacattcgtgatatcgggtaatgcttttttgctggtttgttcgtaataaaaatcgctgaagatagatttatttttgaatggtcttttagaatcattctgtttacatctgtcaaagaatccaagcagattttggttccgtcccccctatggagtttcctattttttaggtaaaatagaaaacaaagaaaggagtggagagtatgaagacgattgtttatagtgggatgatgaacggattgacgattgatcgctcacgacgagatagtatctacaatatggtgaagcattggcattctgaatgcgaaatccaatattttatagaagggaaccgctattttttgattggagaaaaaacctataaaatccaacctggtacattggttatgattcaccccgactgtgtccacaatacattctcaggaaagtatatttatcatgatcgtgtactcgttctctatgaagccagcaaatttccaagaatcgctcaatccatgggaatagatctggagaccttttttttaaaacatcatggtatcattcagattccgccagcggatcgctcttacgtacaaacgctcttagcgaaaatcgcagatgaagtgatccacaaagaatacaattaccaggtaatggtcgaaacaaaattaatcgaactttttatttttattcagcggatcaagaacttcagggggctttctgatgaaccggcagaaagtttgggaaaacaaagcgagctagttaatcaaattgcagcctttattcgtcggaactatgcatcgattcattcattggaacaaatcgcttcgtctttttatctcgacaaatcctatttatgccgtatcttcaagcgtgcaacaggctacaccatcactgaatataccaacattcaacgaatccgtcagtctcagcgattactggaagatacagattgggatattgctgaaatagcgagaaaaagtggatacagcaacattacctactacaaccgtgtgttcaaaaaatatacagagacatcccctttgcaataccgcaagaaacaaattgcatacaaagaaagtctgcgagaaaaaaataatttctaaatagtcactcatctttgcacaggcatgaaaggaggattattttcctgttaaaaaagtcaatattgtacaagttcgcggatattacgtcacttttttgtgcaagttttgcttgtctattgctgagacattttttgtccgataaaatcagtaagcggatacataaatgaaaaattgtaaacgtgtgcattttatggaggaggaaataatcagatgaaaaagaagatattggttgccagtctttttagcactttagttctagcagcgtgtggatctcagcctgacactactggttctggcagcagtggttcaacaaaagatgcagaagcagtgacgattaagtttgcttggtggggagcggataatcgccatgatgcgatgcaagatgtggtggctctttttgaagaggaatatccgcatatcacggttaacacagagtatggtgcgtgggatggatggcaagaaaagacattgactcagctatccggtaaaactgaagcagacgtgatgcaagtgaattacaattggctcttttcattcgggaagggcaagaatatctttatggacttgaatgaggtcagtgactatttgacgctagacaattgggaaagttcttatttagaagcgatgcaagtgggtggtgaacaagccgcggttccccacggaatgaccggtcgggttcctttgatgaaccaagcactttatgaagccaatgggttggaactgccaacgacctatgatgatcttttggcagcgggagaagtcattgcgaaagggaatacgccaactggtgaagacaatcagtacgcatatctcaatgtgggagagttctcattagatctatttattgctcagatgctttacaactatacagggaagatcatgcagaccgctgggacagtcaactatagtgtggctgaagtgaaagaagtgcttgaaagatataaagaattggaagatgctggtgcactgccgacttttgagcaaacaagcccaatcgatacggaatcaaaccctcaatgggtagaaggcaatgcaggctctgtttatgagtgggcaaactcactggcgaaatggacaaactcatacaaaggcggcgacgggttagatgagttagttgtaggagatttcttgcaagtcgatgctgactctaaaccaagtatctatgtgaaaccaaattttggctacgcaatttcaaaaaattcgaaacatcctgaagcagcagccacttttattgagttcttgtttaccaatgagcaagcggtgaaggctgccggagattctttgggtatttcaagcaacacagtttgttacgatctgcaagtagcgaatcaactagtcgaaggtgctgtggctgaagggtacgccaaattggatgactatgaacaaacggtgttagatccatactttgaagacgaaaatgtgcggggagaaagatatacggtttacgaggcatttcggacaggaaagttcacgtcggaggaagctgcgaagcaattcattgagaaacagcaagcagcacttgataagtattaccaagaataggaagcaacaagaaggaatgcgagacttagctacgtcccgtacccttctttttccgaaataaaattggacatgagtgagaatgtctggaagtaacccattagtatctgggcgttcatttagaaggtaaaggagtcaaatgcgatgttgaaaaaaatgaaaagaacaaattgggtgatctactgcatgctcatgccatggatcattggcttcctagtctttaaagtttacccaatcattatttctttttactacagtttgttagaatatccgattttaggtgatccggagtttgtcggattacaaaattatctagagatttttacaaaagacgatacgtttactgcgagtttctttgcaacaatcaaatatgtgttgattggtaccccagcagttatcattgtctcttttgcagtagcagccatcttgaattttaagcttaagggagtcaatttctttcgtaccgcttattatattccttctattttaggaggaaatgtagctgtttcaattttatggaccatgctttttgatgtcaacggacctgtgaatatggtgttgagtgtttttacactcggaaacgatgtcgccattaactggacaaaagatccaaagttcgcgatttttaccctgattattttaaaaacttggcaattcggttcgaccatgttgattttcttatcggcattgcaaggtgtttctaaaacagtttatgaagcggcagaaatggatggggcttcaaaaataagacaactgttcaatatcactgtaccgattattacccccgtaattttgttcaacgccgtaaatgtattagtcaaagcgtttcaagagtttaactccgcgtatttaatcactaaaggtggaccaaataagacgacttatttcttgaatctttatatttatgatcaagcctttcaaaatgggaattatggctatgcgagtgcactaacatggattttgttggtgatcatcggtatatttacggttattattttcaagtcatctgatcggtgggtattttataatgattaagggggctgaataatggaaatgagtaaatctcgaagacggatgaatgaaatcattcgttatggattattgattggtgtggggattatcttgatttatccgttgttttggatgattggttctgcgtttaaagagaaccgggacatttttggtagcttgagtattttcccgccaagtgaccgtgtggttacaacgaatttttccgatgcttggcagttgacgcgagaccattctatctggtttttctttgggaatacactgaaatttttgattccaaaaacgatttttacagttttatcttgtgtgattaccgcctatgtgattgcacgaaaatcgtttaaagggaaaaaatttgtctttggtgccgtgatcgttacattattgatgccagaactggcttttcgcattccactgtatctgttgtaccgtgaggtgggacttttggatagttttgccagcctttatgtagcggatatttttgctagttcttcgttttttgtatttatgatcattcaatttatgcgaacaattcctagagagttagatgaagcggcagtgatggacgggtgtaatgaatttcagattttgttcaaaatcatcattcccgtaatcaaaccaattctgattaccgttgccttgctaagctttatgtggggcatgaatgatttccaaggaccattgatttatttgaatagttcagataaaacggttctatcagtagcattgaaacaattattagacggtgaagcaatggtctcctatgggagagtattcgctgcttcttgtttggggctgttgcctatgatcgcaattttctttatgggatcacggtactttattgatggtgttgcttctacaggaagtaaagagtagtcatatgttgatcagaagaattctcgcacaaatcgttgattttgttttagggattttaaccatatttcttatctttgtaggaggaattccgctaatcggtcgggtcatcaataatgactttgttgctgttttgactgcgatttgtttgatgtgtgttatgtattttgcactgcaatatccattcatgcaaaatcagcagacgattggaaaagcattctttcagctgcagatcgtttcaacagataaatatcgcaaaaatgttccagtggcagtcatttttcaacgagagattttatgcaaactagccagctgtttcttcatttgcctgccgctactgtttggcaaagaaggagggcatgaggcatctacacatacaaagttaagaattggtaaaggagaaaatagttggaagaaataagacaatttttggatcaagtaatcgcacattcttcgccagaagcacctatttggaatcaagaggctcgattagccaatcatccaatccgttggagttatatcgatggctgcatgattctggcgatccaatacatgtttaatgcaacacaagacgagaattatcttgcgtttgttgaaacctttattgatcactacattgatgaggcagggaatccattggggtacgatgaaaaagaatataactgtgacgcaatcaatgaaggaaaactattgtttcagttatatgcaatcactaagaaaagcaaataccgcaaggctctagataatctgtatcggcaagttttgttgcaaccgcgcactaaggaaggaagcatgtggcataagctggtctacccgcaacaagtttggctagatggtttatacatggttcaaccatttgcgatccaataccaactaacgtttggcaactccgcagatgttagtgatgtgattgggcaattcaaaaatgtcatggagtcaatgaaagatccgcgaacaggattgctgtatcacggatacgactgtacgagaactgcattttgggcgcatccaaagacaggttgtagcgcaaacttttggactcgttctcttggatggtatgctatggcattagttgacacacttgaagttttactgtcccatgaaggctatctccaagaaaagcagcagttgcagcgctatttaacagaacttgtaggtgcagtaatggcttatcaagatccaaaaacgagtctcttttttcaagtaacagatagaccagacggtgaagacaattatttagagacgagtggatctgctgctttgagttatgtgatgctaaaagccagtcgattagctattcttccttcacaatataaaataatcggcgagacgatcctacgcgctcttgtaaagcacaaattggttattaaaaacggagaatttacattgaaagatatctgtttagttgctggcttaggggggatgcctggaaaaggcaactacaaaatcagagatggctcctatgagtattatatttcagagccagttgtcaacgatgatgctaaaggcatcggtccgttcgtttatgcttacagtgaatggttgcaactgcagaaccaataaagacagtgattcttatcattttcgtaagcgcaaacaaaccatttggtctccttcgcagagtaagatacaatgaaatggtaggcaacttccttcaatgaaaaggcaagtgctgaaagatagaccgatttcacgcgtacacaaaataaggaggctttcaaatggataaaagaaacctgacgattattggcagttacgacactcgggctgaagcattgacagcaattgatcaattgcgaaacgaagggtacaacaaagacgacattgttttgtttgcgaatgcaacgatcatcgagcagtttggcttagatacgttaagtagtgcagaagtagaagcgactggaggatcagatgatgatcgttcaatgtgggaaaaaatcaaagatgctttctcatttggcgactatgaccatcggacgattgatgatgagagtgatcctttatttgcctatcgtgacgaccttgagcaggatcgtttagtggtaggagtctacgattatcacgcaaccgatcgaatcgaagaaacagatacagcgatcattgatcagcctgttacaggtgagacagcaatgcctgatgaatcggttcatccgacccctcgaatgggagatagtgatatcgaaacaccaattaatgacccaaatcacttgcgtaatttataaaaaagatcccatccagtaaatggtcggcttataatcaaagaaatagcagccctgcaatggctgttatttctttgtatttcagatgttaagcttgtaaaatacgggacaattgctgcaacgaattcttaatttgttgctcgtttcttttttttgtataatagatggagaaaaccatttcttcaaaaaaatgcacggtacttcatataaagagaaggtgagggatagcaatgaagttgaaatttaatttgcagtcagcactcgttagttgttttgtcacgattatgttgagtatggcaattgatcaagacgtaaatgcttttgttgcggccccgttccagcgcaattcttcggagccatcttctgaagcaccagtgcaggttgccgaaacaagtacgtctgaaacggaaacaaccagtgaaactttttatgaagcacgggtcagttcctactccgaaacaactgcacagaccagtggaacaaaatcaaatgaagattcatcggccattccgtctacagaatcagaaagtatagctgacagtagtgaagcagtagtgaaggagacagatacagcatctagcacttccaataatggatcagcaaattctgatactacgactagtacatccgaaacgacgagctcctctagcagcagctcaagtacgagtagttcaacctcttcatctagcagttcaagcagtacaggcacaactacttctgacgaaagtgaagagagcacagaagctggtgatacaccgattgatagtaatgatccggccaatgctgcggatggatcagaaccattaaaacttcttttagaagaaccatttgatgccttttttagataagcgcttcggctaagatagtcagagttttaaaccagcgaatcccttacgactattcatctatttgctgaagtattgagtgattattttgtgcaataaaaaagcatctttttcaagcatatcacaaagtaatttcattaaattcgcttataatgaggtgaaaagggggcgcgctatgggcaaatattttaaaaactttgaaaagctgatcagtgctgttgtcgatattatgttagcaattttagttgtattggtattggttgtgatggcagaagcaatttataaaatcgttacttatgtcattcctttgacaaaagtcagtgatctatcctttttgattgaagagattgctacactatttattttacttgaaatcattttgatgttattgcggtatgtaaaagaaggacatcatattcctgttcgttatctgattctaatcagtatcacggcgattttacgtgagttattgttggcacaaggaaaaggactggagacgttgtttttggcgctggcgattttagtgctgatttttgttttacaagcattagagaagttgaaatcttttcatagctccaaagatatctgaaaaataaatcagaaagttacttagaaatcaaaaataatcctatcagtaaactgaatgtctcagttattgataggattattttttgcgaacaaactagcactttctgcttgtagttgcttcccaatatccgtttgccgtacagtgattcgtttggtttggcggaggatgattttcttttgcgtcattagatccttccgctccttgattgctgtctgacgatctgtaaatggttggtgagcagcaagtgtcatcccaaaagaattggataacaatgtgtaaccggcgataccggtaacttcctgataggagcgggataagccaccgtcaattaccagtaggtgcccattggctttgattggcgtctctccttttttcacttttactggtgtgtggccgttaatgatgtgtcctgtcgagtctaatccaaacgcagcgaataagcgacggcaaaatgcttctttttctcttagggtatagtaggcgtttttttcttcaatatgcgtgtgtttattactgatgaaatagcgctcgaaggttttcatggattttttaccgaaaagagaagacccttctccgcaccagagataccaaaggacatcggtcgccagatcgtcggtcctttctggtgttgcgaaactctgttttacacattcttgaaagaaatccatcaatgctttgccctgataagaggtttttccaaaggacactgaaaggaagcgaccatcaggatgacaggggatgcaaccgtggtacagtagattgccattataaatttgatagatcgtgcctttttctactagaaaacgtacatgggttgctaacctttcggaggattgaaattgtttgagaagatcctccagtactttttgctcttcatcagtcaaaagatagggtgcttcgggatcaaccaattgaaagcaagcatggatcagaggctcaaagtgatcctctagctgaatctgcaaatcctttgtgattttacccaatagcaaacgatccgctaattgaaattcggggcgtcgtttgatcacagcggcctctaccttgaattgaatgattgcaaaggcttgctggagaagcatggcgtcgtgaatttcctcttcggaaagatcatcaacagttttcttaggataaaaccccttattttcttgataatgtttacgactaaatgctatggctttagagaggtcgatgccatagccttctttcaacaatgctaaatttccataccgtgcagcgatccgtatggtacttgccaaacaagggaaagaaccgcagtaactcccgatccacaaaatatcatggttccctaattggatatccaaagaaggaagcgccatgagccggtcgatgattttatcaggtgcgggtccccggtcataaatatccccaataacatgtaggtgatcaacgacaaaacgctgaatcaaaaatgctagctgttcacaaaatagaggcgctaaggataagtcgatgatcttatcaaaaatcgctttataataggcttctttgttgaagtccgagtcatattgatacagcaattcttctaaaatataagcaaattgttttggtaaagcttttcgaactttggaccgcgtatatttgctggaagtaaaacgagccactttgaccagttgagtcattaattggatccaatcctcatgcggatagtctttttcttgcaatacttcttttggatagtaaatcaaaaaacatagctcggtcttctcagcagctgtcagtgagtattgaaacaatgtttcgactttttcccgaatgctgcctgaaccattgcgcaagatatgatcaaaagcttcatattcaccgtgcagatcactgacaaagtgttcggttgctttaggtaactgctggatcgcctctaaattgataatctcaatgaaatcatttaattgatcttcagtgtgcataggcattatttttgtaaaattcttcgatcaacatcgaactttcttcgatcgaccgtttgctgacatcgattacattgattcctagctgttggaataattgattcgcataggctagttcatcatcgatccggcttggttctgtgtagttagtagtttctttcaaccctaatgaagccagtcgagaacggcgtatttcgacgagtgagtcagaatttgtagtgagcccgatcatttttttgggatcgatttgattgatctctttgggtaaagcgacctcaggtattaaaggcagattagccactttgtaaccacgattagccatatatagacttaacggtgtcttggaagtacgggaaacaccgagcaatacgatgtcagcatcgagaaaaccacgaggatccttgccgtcatcatacttcactgcaaactccattgcagcaacacgactgaagtattcttgatttaaacgatggattgcgccaggttcctgaactgcttgtagcccgacggttgcttcgattactgagatcaatggcgtcatgaaatcgacatgttgaagaccggtgcgtttagcaaaggcttcgacaaatttcactaaatctttgttaacaagcgtcgtcacaacaatcgatttatccagtaaagcatcttgtaagatttccaataagctctcttcatcatttgtaaaaggatacagttgaatatcggatagatcgatcgtaggaaattgtgcggaaacggcactaatcaatttttgtgctgtttcaccaacggaatctgaaatcaaatatagtcgaacattcttcatttttttcgctccttagaattgattgttttcgatcgcattgcctgcttggatatagtagttcataattttagacttggttattttaccaatgactttttttggattctcagcatcaacaacagggagtgtatctatttcatgcctagctaataaggtacctgcagtcaaaatagtttggtcggcagtaatcgtgacgatattcggcattcgcgtcatgatcattgccaccggtgttttttctgctgctgaattgctgatagcgaagcgcagaaggtctttgcgggatagaacaccaattagttcctcttctgcatttttcacataaagagacccgacatcatacatgaatagggttgtcacagcatcatataccgaaacggattgctcaatcattaacggtgggatcataatctctgctacttttgcatggtatagcttatcaaacaacagcggttctacggtctgtccggtataaaaataaccgaccttgggccgggcatcgagtaatccagtcattgtcaggatagagagatcattgcgcaaagtagcacggctgaatcctagtttttttgcgatggtttcaccactgataggttgattgtcttttacgatttcaatgattttaagttgtcgctttgtcaattccaatgtgtcaccttctttaaataaatgtgatatgctatttattatatattttccgcgtggaaaatgcaataaaggattttggcgcgaatttttcttaaaaatttcttcttgacgaatcaatagtgtacgctatatacttcgttttaagcttaatagtatatcacattaggaaggcggaaaaaaatgaagaatatcgtttggttctcagaaggtacgaaagatcaaaaagaattactaggggggaaaggagcaaatttagctgaaatgaccagtatcgggttgcctgttcctgcgggatttattgttacaacagatgtttgccgacaatttttagaaaaccagcaacttacacagccgttggtagaagaaattattcgagcagtagctacattggaagaacgaacccacaagtcttttggcggaaaccagcagccattactggtttctgttcgcagtggggcaaagtattccatgccggggatgatggatacgattctcaacttggggttaactgatcaaacggtacaggcgctggcagcgaatacaaagaatcctacatttgcctatgattgctaccgtcgccttatccaaatgtatggggatgttgttaaagggatcgataagagtcattttgaatcctatttaacgacctataaacataaaaagggatatccttctgaccaatcaatggtcgctccagactggcaagagatttgcgaggttttcaaaagtatttatatggaacatacgcaagaacgattccctcaagatccgctggaacaattattatcagccgttcaagctgtgtttcgttcgtggaataatccccgggctatcacttaccgtaaaatccacaaaattgctcatgatctaggaacagccgtgactgttcaggaaatggtttttggcaatagtggtgctgcaagtggaactggcgttgcttttactcgcgatccgacgacaggacacagaggattatttggtgaatttctcgcttgtgcacaaggagaagatgttgtcgcgggggttcgtacgccaagaccgattagtgatttagccaaaacacaaccagaaatccacgcgcagttttcggcgattgccgagttactggaaaatcattacaaagatatgcaagatatcgaatttaccattgaagaagggcgattatttgttttacagactcgtaatgggaagcggacggccaaagcagctgtacagattgctatcgatctagtttctgaaggaaagatcacgaagaaaacagcactgcatcggttgacaccagacatgctggatcagttgctgcatcctatcttttctccggaatctcttgcgaaagcttctcctcttggtcaaggattgcctgctagtcccggtgcagcggtaggtcgtgtttacttttcggcagaagcagcggttagtgcacaccaagcgggagaaaaagtcatattattgcgacaagagacttcaccggaagacattgacgggatggtcgttagtgaagccatcgtgacttctcgaggcggcatgacttctcatgcggcagtcgttgcccgaggactaggagtatgttgtgtggcaggttgtgatcagttagctgtcgattcatttttgaaacaagctcgatgtggtgaagtaatcattcaagaaggagactatctatcagtggatgggacgacaggcaatctgtatcaaggggcgctatcactggttgcctcgcaagattttggtttgctgcagacgattttagactggtctaaagagagagcagacttagtggtacgtgcaaatgcggaaactatcgaagaaatcaagacagcagcttcttttggagcagcaggtatcgggctagcgcgaacggagcatatgttttttggtgaagctcgaatctggccgatgcggcaagtgattttagctgaaacgaccgaagaaagacaagtagctttgtctcagctgaaaacgtttcagttaaatgacttcaaggagttattactgcagacaaaagaacagaaatgcgtcattcgtttgttggatccgccgttgcatgaatttttaccgcgaccacaagaatatgaagaaatggccaagcgcagcggctattctctagaaaaaatcaagcaacgaatccatgatctacaagaagtaaatccgatgatggggcatcgaggaagccgtctaggaattacttatcctgagatttatgagatgcagacagctgcaattatcgaagcggcactacaagcttctgatgcaggaagtgttgtttatcctgagattatgctgcctttgatcagtattccggaagaaatgcgcgttttgagagaacgtcttgaaacgtacattcggcaaatttttgcccactatcagaaagaagtacctttcaagattgggatgatgctagaaacaccaagagcatgtttattaacaaaagaattagctccgctagctgattttttcagttttgggaccaatgacctgacgcaaatgacttttggattttcacgggacgatgctgctggttttattcaacgctatttagataaaggaatcctgtctgaggatccgtatcaacatcttgataaatcgggagtaggacaactaatggaacaagcggtggcttcgattcgtcagcaaacgaagggaaaagcgattggtgtttgcggtgaagtaggcggtgatccacaatctattgcattcttgcgggctattggtgttgattatgtttcatgctctccatatcggattccagcggcatggttagcaattgctcagtctgcatcataattgcttatactctgaccatctatattgctacttgagtggagtctgcaatgaagttgttaacatgcggtcattatcaacgaattgtctgtttttctaaactgttaatttatgaatagctcgaacattctcaagtaatttgatcttcagtataccggttttctaaaagagtctattactatcgttctaaaagcccacctttggctgttgaaaaaatatatcgttgttttttgattctatggaaattcttattgtgctcgtttaactaaaccatgcggtatcaccgtatggttttttagttgattctacaaggtttttagctattgttttgagtggtttctcctacaggacgatttcggttcagtgttatttgtatggtggaaaagcaatggctgcattttctactaatgaacgctcttaatagttcggtgaaatgaccgattatctttactgagggtcgtcttcagacgagtcttcattggatagtgtgaaattgtaaatgaaggagtggcacatttgtgaaaaaaaggaaaaaaacgataggaatttatgtgatggtcaccttgattttggttgcggggatcccgatcattgtcatgctgacaagttcttatttgaccacaaaggatttattgattcaacgaaatgatttgaataaagaaagtgccgttaatttgattttggcggaagaaaaaagcttacgtcaatcgacggaaagaaaattgaagtcaatggctgaactgccatccatgaaaacagaatttagtatggcacgtatccgctcagatctttctttagcaattgctggaaccaatagctttctagaagtgacatttggaacggaagatgatgagtatgtgaccttcaaccctttgccagatgattacaaaccaacgactcgtccttggtacaagggggccgttaaagccgaaggagaagtatattggacagacccatatttggatacggtaacgaaccaatttgtgacatcagcctccattatgattaagaattcccataatcaagtaggggttttgagtgtagatgtttcatatgaaagcattcaagacattttgtctgactttaccgttggacgaacaggaaatattacattagtttcagaatctgggatcattgtcacttcaaagaacacgaaacaaatcggtaagaatatcaaagaagaagaagtattccaaaagatcaaagaagcaaaagatcctaatggtaaggtcggtttgggcgactcaaataaagtcaacgatgtgttgtacgacaaatctgctgattccaatgtttgggcttattccgaagtcaaagccagtgatttagataaagagttaggagcgttagtccgcacgacgatcatcgtcacaatcctgatgttgctatttgtaggacttgtttcctatgcggccattaaaatagtagcagcgatcatcgattgtttcaatcactactttagaaaagtcggtgaaggcaaactagagaagatgagccagtctaaaagagttaaaggcgaaaaatggacttgggaccagttagcccgtcgagtcgtttatccagataaaactgggaatgagattcagcaaatggcagacaattataatgtgatgatcgaaggcactggcgcattgatccaaaaagtgcaaaaagaaagtagtagtgtcgcagaaatgtccgattctttattggaactttcaaaacaaaccaatattgcgacagaagaagtctctcaaaccatcacgggtattgcagaagttaccggtgcacaagctcaggaaacagaatatagtgtgtcgcaaatgcaaaatcttacgcaagtaattaaagaattacgagataacgttggcggaatgagcagcaagtcgcaagaatccacgaagattaatcaagaaaacttaacgatcatggatcaagtcgatgacagctggcgtcaagaattggcacagatggaacgcttaatgtcaaacatgacgggaatgaatgatagtatccaaaacatcaattcaatcattggggtcatcaacgatatttcttaccaaacaaacttgttagctttgaatgcttcaattgaggcagccagcgcgggagagtccggtaaagggtttgcagttgttgctgctgaaatccgtaaattggcggagcaaagtaaagcttctaccaaagaaatcgaagcgattattgaagaaattcgtgagcaatctagtcaaatggtcaaacagacgtcagcttctgtaaaaggtggcgtacgacaaaccaacttaattaaagaagcaatttcgtcttcaaaagaagtatttcaacgcagcagttatatgattgaaggtattcatcatattgaagaagcaagtgcacgtattgaaaacattcaaaatagtgtgttggaaaacttagaaaatatttctgcatcaacggaagaaaatgccgctggtacacaagaggtttccgcaaacgcggaagaagttttagctaccatggatgaattcaccaaccatgtggcagacctaagagacatcgcggaagaattgaagcgattgactaatcgatttgaagtggaaaaatagaacaagaagaaaacattcatcagctattcgaaagcatagctggcgaatgtttttttactatcaaagaagatgctacaaaaaaagccaagactgatgtcagcagtcttggcttttcatgaagatgtttataaacaattattgctggttagtgagccatttctgtccgctggatgatcatctctacacgacgattttccgagcggccttgcggggtgttattatcagctttgggttccgtatcagcaaaggcttgaattgcggcattcttttctaagacggcccctttactgatgaaatactccataacgttaatggcacgggctgaactgagatcccagttggattggtatcggccattgcctttttccggtacgttatcggtatgacctgcaatcactattttgttggtttttagttttttcagtgagtcagagagcaaatccagtgactgccgagtggtggctgtgatctcagcactgcccgatgtaaacaggatactgctagccaaagtgatatggagcccatcagattctaagcgaacttctgtttgatcttttaggcctgaagaagctaattcttgtgatagctgatcgctgattttttgcaattgttgattttccagttgagtccgtacagaggcttcctgtgcttgtgcttccgtagatgtgggtgctttttttcccgtattagtctcccccatatcgatcacggatccgatcacagaggagctgctatggtgactagaaaggatggtgccaaattcacttctgatttcttgaaatttctcatcatcgactttcgccatagcaaacatgacaatgaataaagccagcagtaaggtcaacatatctgagtaaggcaaaagccacgcttcgtctacgtgttcttcatgtttcttttttcgcttcatatcggttcatcctttataattgttcttcccgttttttaggatcgatcaagctatataacttcttctcaatgctttttggcgattgtccggcttggattgctaagaccccttcaacgatgatcgacatcatttggacttcttgctcagatttcaaggatagccttgagctaaagggaatgaacagaacataaccgaagaaaataccataaagagttgccacgaaggcagctgagatcatgtgtcctaaagcttctacatcttctagattgcctagcgccccaatcagcccgatcacggcacccaagacccctaaagttggagagctagttccagcggttttgaagatagacgagccaatacgatggcgttcttctatcccatagatctcattctccatgatttcttgtatctgttcggcagcaatgccatcaaccaccatttctaaaccttttcttaaaaatggatcttccaagttttggatggcgccttcaagagataataaaccatcacgacgtgcttggttggccaattcaacaatcgtattgatcgttgtttttaagtcgtattctttatttttcagcagagcgccgaagattttcgggatttttttgatatcactgctgggaaatgaattgataacggctgcgatcacaccgacgaaaataatgattgcggctgcggggttgattaggacagccacattggccccttttacaatcattccaaccaccacagatatcaatcctaaaataataccgatcagcaagaaaaaatccatttgttgcgtcctcccaaattctttattccgggttttaacccttttctatttttatcggtgaattaaaattattcttaatagcaaaaaaaataatcctaaaaataactgagataaaattactgattcttttaatttttgtttttttggataaaaagtccaagcttttttatgaatggtatagtttgtagatcctgtggaaattttcagatggtatcgtttttttggtgaagtatttctcgtttttttaccatttatacaggcgttcagtaaaaaaagttaatcatttatatacataatgaacgtttttttatcaaaatgcatccttttatagaaaactaaagatagccatataaagcgtttaatcgagagagacttctttttaaatttgctgatcagtttgtgatgaaacctaatttaataaataacataacatgattgtaacttaactgacatatctgtaaagttgtaaaatcaaattgtaaaataaaagcaattctactataatgacatcacgaatgacatcacgtgttcttgtttttttaatctataatataaaaaaatattgaaaaaaataaatatatttttctctggcccataaaaaaagcatttggtacagaatatggaaggagcaattactgttggatacctataatttattaaaaacagccatgaacgtttctgcacaacgcgcagaattgatttcgtctaatatcgccaatgtcaacacggatgggtacaaagcaaaacgcatcgtgtttgaaagcgaattaaagcaggcactcgcttcatcagggacggacgctgcaacagaagcgtcagtttctcaagtaaaaccgaaaatcactgaaaatgcaactaccagcatcaaagacaacggcaataacgtggatcttgaagtggagatgttggatcaagtagccaatgggttatattacagtgcattgaccgcacaagtcaacggacgcttgcaaatgatgaaccttgtattgagtaattgatagaaagcgcaggaaaaacaaatgggtatgtttaacggactaacgatcaatgcgagcggtctagcattggaacggttaaaactagatacgatctccagcaatatcgcaaatgtaaatacgaatcaaacacaaacaacagctgcttatcaaaaaaagagtattcttttttcagaaaatttaaaaaatagtcgcgaaggaacaccggctacatatggtgtcaaagtgacggggatcgctgccgatgagacagaaaagctgacctatgatcctaccaatcccgctgccaacgatgagggatatgtcggtcaatcaaatgtggatattgccgatgaaatggtggcaatgttgcaagcggttcgaacgtacgaagccaatgtttctgcatccgaaatgaataaaacgatcttgaaaaaagcattagaaatatcaaaggggtaacgagaaaatggatggacttttaacgacaggattaacagactaccaaaacgttttgcggacactaggcacgggggctgcttcaaacgagaccagtgttgcaggcgccaaggaaaatcagttttcttcctacttgacccatgcggtcgatcagttgaatcaaaaaacgacggtcatggatcaagatactgtaaatttgatcaccggcgatgaaagcgatctaggcaatgtgatgattcgtatgacggaggcgcaactggcgctacaaacagccgttcaagtaagaaacaagtgtttagaagcttacaatgacgtgaaaaatatgcagttttagcagtgggtgagggaataaggataaatgatggataaagtgaaagaatggacagaacaactcaaagaccgttggcaaatgcaaagctctttaaagaaaatgatcgttgttctttccgttatcagcgttctcggaatcacagcagctgtttattatttaaatacgcgaattgaatacggtatcttgtttacggatctgagcgatgccgatgcgggaacgatcagcaaggatttggaggaacagcagatcgcctacaaattagctgacaatggaacgacgattttgatcgataaggaccaagtcgatgaataccgcatcaatcttgccgtggacaataagttaccaaataccagtacaggctttgaattatttgatgatgccaacatgatgacaacggacgaagaccgcaaaatcatgtatcagcgggcagtaacgggcgaactacagcgagcgatcgagtcgatcgatgcagtcaaatccgccaaagttttactcgtgatgccagaagaaagtgtcttttcttctgaggaaagtgcgccaaccgcctccatcgtgttgaccttgaaaaatcagcagatctcagacgagtccgtgcaagggatcgttaccttgacttccggcgcagtggaaaagctgaagccagaaaatgtaaaagtcgttgatagcgcgggcaataccttgactagaaccgaagatgaagccagtcaattaagtggcctgaacaataaatacattgccatcaaagattcctatgaaaaaacgctagaagaaaaagtagcgaagttgctgacaccgatctatggtgcagacaaattccaagtgtcgatcaatttagacttgaattttgattcgatcgagcgaaagaaagtcacttatgatgacccagagatcaagagtgagacagtgcaggctgctggttcgcaagggaccgtccaagaagcccaaacaggcacggtggatgacaatgtctccaatgtgacgggcacagatggagagggaaacaattcctacagccgttccgttgaaaacgaattggataccgagaccaccacgaccattacggcccctggcatgatcgaacgaatgaccagctcgatcgtgatcaatgcgaacctttcgcaagcggatcaagcagaattgcagcagttgattgctagtgctgtcggctatgacaatgaccgtggtgatcaaatcgcgatccaaggatttgactttgcccaagcagaggttgatccagccgctgatccgcaagggaatgaaccgattgcagctgccaaaggttatctcaagtatgccatcatcggcggcatcgtgttgaccttgttcttagtgatcttaatgatcgttggcgtgatccgacgtcgtcgtaaagaagacgagctggaagtcgatgtgacggaggaaatggtcacttttgcacaaccgtccgtagttagcactggagcaagtccgacagttgcacaagaagtcgtttttggtggtgtcggcaatcggtctgctgaaacgaaaccagcggcgccagaagcatccacacaagaaaccgcagcagaacattcaggagaaccaacattggatcaaacggctagaaattatgccgaaagcaatcctgaagtagcggcggaattaatcaaagcttggatgaaagaaaaataagggggcagccatggatacaatagatggggtaaaaaaagcagcgattcttctgatctctctaggatcagatacctctgcaaagatcatgaagctgctgccagaatcatttatacaaaaagtgagctatgagatcgccaacatcgactttgtcagtcccgaagagcgggatcaagtgttggaggaattttctcataccgcaacggcccgcaaatatgtcttagacggcgggatcgattatgccaaaaatttgctgaaccaagcattaggccctcaaaaagccaaagaagtcattgacgtattgactcagattcagctgcgggaacggccctttaatatcgctcgcaaagccgatgttcaacagttgaccaatctgttgatcggtgaacatccacaaacagtagcgttgattttatgctacatgcagccggacaaagcggccagcgtcttgtcgcagtttcctgatcatttgcaagtggagatcgctgaacggatcgggacgatctccagtacgtcgcctttggtgatcgaacggatcgaaaaagtgatcgagaacaaattctcgaattacattgagaacgatacggaaaatgtcggtggtgtgcacacactggtagaaatcttgaactcagtcagccgcagcaccgaaaagaacattttgaacgacttagaaaagcggcaaccagaactatccaacgaagtgaaatccagcttgtttactttcgaggatatcgtgaccctcgaacgcttggatgttcaaaaagtcttacgagatgttcaaaacgatgtcttagtcttagcgcttaaaggcacgaccgatgacatcaagaactttattttctccaacctctcatcacgggcggtggaaaatctacaagaagaaattcaatttatgggtcctacccgcttgtctgctgtagaagaagcccaacaaagtgtggtggctgtgattcgacggctagatgaaaccggtgagatctacatcggaaggggcgaccaagatgcagtggtcaaatagcagtttattgaagcagcaggcggtcaaaacgaccgaagctgctcgcagtattttgacggatacgaccatcaaagtgccgattgagaaagcaagcttagacccagaactgcaagcggctagacgtgcacgccagttggagcaggaacggcatttgcagcaaatggaagccttgaagcagcagattttgaccgatgcacaagcacaagcagcgcaaattctagcagaagcgagagcggaaggctttcaagcaggacaagcagacggctttcaacaaggctatcaagaaggactcaatgccagcaaagaagccgcgcaagcattgatgtcacaagcccaagccaatgtcgctgaagccgtttctgagatcaacacctttcgctcagaaaaaaagcaagaaatgatcgcttacggcacggcaatcgccgaagccttaatcaatcaacgttttacagacgagcaagcaggcttcctgccttttgtggagtctgtgctatggcaatttgaacaacccgatcaatttgtgactgttcgcagccaagagcagcatcttgcagcgttgcgagaattgatggaaaccaaaaagcaggcgatcagcgggtttcgctatttactcatggcagatgacagcttggcggaacacgatttttgtatcgaaactgaaaatgccttggtggtttttgaactgaggaaagaaatcgatcgctttttgagccaatttctagaaagcagtgtgaaggaatgacgtttgaattaccgatcacagagatgcgcaaaacggcgcaatcacagccgttttttaccacctacggcaaagtcagcgaagtcgtaggtctgctgatcaaagtcgaagggctggcggttttcataggagaaatctgtgaagtcgcactgcaaaacaagacacatacagctttagccgaagtcgtgggctttgtgaaaaaaaccgtgctcctgatgccccttgatcagctagaaggcatcggacccggctgtttggtgcggccaactggcaaatcattgacggtaaaaatcgatgatacgctgctagggcacacattagatggactaggacgaccgttagatatggcgctggatctggaaagtgcgccagaatatccagttagtcaagattctcctgacccctttcgtcgtcaaaaaatcgctgagatcatgccgacaggtgtccgggcgatcgatggtctcttgactgttggccttggccaacggatcggcatttttgccggcagcggggtcggtaagagtaccttattggggatgctggctcgttattgcgaagccgatgtcatcgtgatcggcttgatcggcgagcgaggaagagaagtcaaagaatttattgaaaatgatctaggcccagaaggctaccgcaagtcggtcgttgtctgtgctacctccgatatgccgcccctcgtacgactaaaaggggctcatgtagcaacggcgatcgctgagtattaccgcgatcaaggcaagaaagtcgtattgatgatggactcggtgacgcgttttgcgatggcacagcgggagatcggtctatcgacaggcgagccgccgacgaccaaaggctataccccttctgtgtttacagctttaccgaagttgttagaacgcagtgggatgtcggacaaaggctcgatcactgctttttataccgtcttggtagaaggtgatgacatgaatgaaccgatcgctgatgcggttcgggggattcttgacggacatattctgttgtcccgaaaaatcgccgctcaaaatcattatcctgccatcgatattcaaaatagcctcagccgcttgatgaagaccctcgtttctgagaagcagcataaacatgcgggggaactaaaagaaaacatggccgtttatgcagaagccaaggatttgatcgatatcggtgcctacaaaagcggcagtaatgcgttgaccgaccaagcgatcgcgctgcatcaccccatcctacggtttttacagcaaaaagtggatgagcggatcccatttgaacaaacgatttttgaactggcgcatttgttcagtgaagaagcgctgatcgagcgccagcgttcaactatgtaaaagagatcataaaggagcagctatgcaagcatttcacttttccttagaaaaagtattggatcatcgaaaaactattgagcaagaagccaaacgaacttacgcccaaaaacaacaactattgattcagcaagaacagcgcctgaatacgctgacacaggaaaaagcccagctttttgatgtcaatgagatgaccattgggcggatgcaagtgcagcaacgttatttgcttgcgttgaatgccaccatcgatgaggttcagaacaaaatgtttcacgtgaagcaagaattggcagagtcgttatcggtggtggtagaagcgcagcaggaacgcaagatcgtggaaaagctgcgagaaaaacaatttgctgaatacatctatgaagagcaattggaagagcaaaagcaattggatgagttcggcaatcgcgccttattttcttaaagaactaatggttttagtgataagacgaccttggtttcaaagcatcagctgagaggaggtgaacaatgaaagagatcacaacaagtgccgtatcccctgtacctgtcggcagcaaatcaaaaaagacggaggcgtcaccagaagccttcagtttgctgatgcaacagctgacggaacagaccgcaagcaatctgtcagcaccctttgaaacatcaggcatgacggagcaaaacgccgttgcaccagaaatgtgggttgccagcagtatggaacatctgccgcaggagccagaaatcacttcagcacccgaacagcttgcaacgacacaagcgccaggaatgagccagatcagccaggcaccttttgcagacttggttcatgaagcgccacaggcatcgatggtaacggcggagcagaaccaaacgagcgccggcacagcagcttctcccgacagtgtttcagctgctttagcaccaatagacgtagccaccacagtcatcaacccctccgagtctacgcttgaaggtctagatttgatgacaaatgacagaagtgaagccgcagcaacaacgcttgaaacgcctttgccagaagacttagtaggcgaagagcagtccacggcaaaagggatcgctcctttcaaggaaatcaaggaaatcgattcagtaacaaaaactgcgattgcggagacgacagaagcacagctgaaacagtccaccgaagggatcgctcaattgggccaaaggggaccattggatcaagcgtcgccagtgacccaccaagcgacggatacgactagtaccttgcaacgcacgaatgaaacagtcgccaaaaaagcggaagctgtttctgcacaagccattgcttcttcaacagcaactgacaatgaaatggtggcaccagcgctgcaactgcttgatgtttctccccttttgaccaagcaaggacccacgccaacaaaagcgaatatggaacaagcggtcctacccttagcaaaagcggctgcccaactcgtccaaacgagcagcacggcaagcgagaaaaaaatcacgctgcaattcgttcctgagaaattaggcacgatccagctttctctagaaacgaatgcccaaggcagtcgcttagaactgactgttcagcagccgcaagccaaagaattattgctgtccatcaagcatgagctagagcaagttttgcaaaagcaagagcagccgatcctagtgatcaaagaacctacgttagcttctgtccagcaggctggtccgctgtcaaatcaatcctttgccggcagtatgatggcaagtgacagtcagttaagccaacagcgttttttacaggctcaaaaaggacaaagcaaaaagccgtttcatcaaagcaatacggctgaagaagagcagcaattagcaccgatcgatcatgcgatcagtattttagtgtaaaggaggagaactatggcagatgaaattacagcagctgcggccggtattgccaatacatcggcattaacgcaaacaaaaaaatcttcagatatctccatggatgattttttgaagatcttagcagcatctatgagcaacccatcgatgggaggcagcgattcttctggtggtggtagcaccgactatatctcgcaactggttcaatttacgaccttagagagcttgaatgaattgagcgaaacgttgacgacctcggtgattttacagcaacagcagcaagcttttagcttgatcaataaacaagtcaccctgatggacggcacagaaacattgtcaggaaccatcgaaaaggtccgctttgccaatggctacgccacgatcgtcgtaaatggcaaagaatacagtatgagtgcgatccaagagattggtggcgaagcaaaatgagtttgacgattcaacaggggctgcaaaaagttgccggggagccttatcaaaatccccgcaaagtcgtggacaaacaagccttttcttcaatacttgaacaaaaacaaaacgacatcaaagtctcgcatcatgcgcaaaagcgtttgactgcaagggaattgaccttacaagatgatgattatcaatccctttcaacggcgcttagtgagctagcggaaaaaggcagcaaagaatcactgctcgtttacaaagatatgggcttgatcgccgatgtccattcacgaaccatcattacggcgatggggatgaatgaacttcacacagtcaccaatattgacagcgccacatttatcaaatagcagctggactgaaaaggggctgcaagtattttctgaatgacagaggaaaatacgccaaccataaggaggaaaacaagcatgttacgatcattatattcaggtgtcagtggaatgaaaaatcttcaaacgaaaatggacgtggtttccaataatatcgccaacgtcaatacggttgggttcaagtcaagtcgtgtacttttccaagacatgatgagccaaacgatgtcaaacgcaactgcgccaggcaacgggttaggtggaatcaacgcaacgcagatcggtttaggggttcagacgggctccatcgataccatcaatacagtcggtgccccgcaatcgactggccgcagcatggatttttatatcagcggacagggctactttatggtacaaggaccaggagcaaatggcgaaacctattacacacgagatggcgcattcgttcgtgacagcaacggaaccttgaccaatagtgatgggatgcaagtcttaggtcgttcagtcaccggcggtcaaccggttgtctatgatgacaactttgatgaaaacacagcattgagcggacaagaaacggtatctcccttatcaattccaagtacactgaccgtcaatggggaaaccttgacctataactccatggcaatcgatgccaatggcttagtgttggcaaaatacggcaatcaaacctttgtgatggggaaagttggtgtcgcaacctttaataacccagaaggcttagaaaaagtcggcggcaacaactatgtccaaactagcaactcagggaatccaatcgtcgcaggccctggcaacaacggagcaggaacgctacaggcgggtgccttggaaatgtcgaatgtcgatctttcgacagaatttaccgaaatgatcattgctagccgtgcctatcaagcaaattcaagaagtattacgacttctgatgaaatgctgcaagaattattgaatctaaaacgttaagaacgtgacgcttcatcattgagaggagtttgaccatgattctagtgacagcattgaatggcaagccattctatttaaatccaacattgatttatcggatcgaagaaatgccggatacattgattacactgacagacggcaaaaccttagtggtgacggaagctgcgcaagaagttgcgcagcgggtaatcgagtatcatatggtgatccattcgaaccaagtgaaaacgtaagggtgggaaagatggcaaaagaagaaaaagcaccaaaagcagaaaaagagaaaaaaggcttgagtatggttgttttactgccgatccttttgattgtggtagtcggcggcagtatcggcggtaccttagtgacgaatcactttttgacgggggaaaaaacagcagctgctgaaacagcaaaagacagcagcaaaatctcctcagacgaagcgatcgtggcactggatgaatttttagtcaatctggcaaaagaagacaaccaagagcagcaatacatgaaggtcaatttatcgattttagtcgccgatgaggaaaaaagcgcggaagctacgaaaaatgtggccgtcattcgtgacagcgtcgtaaacttattgcgccaacaaaaggccagcggtattttgagctccgccgaaagtgtaccgaatttaaaaaaagcattgaaagaaacaattaatcaggaatacggatcagaaatcgccaaggatgtttatgtgacggatttagtgatccaatagaaagaggcgtgttgatggaaacatttttatcgctggtcaaaatgattgggtttttgctgcttattctttatttgatcaacatcagtttgaaatatttaaatcgttacacgaaccagcacaatcaccagttgcgtattttacaaaaaatcgccgtcagcaagtcgtcttcgatcgggatcgtccaaatcatggacaaatgttatgtcatgagcttttctgaacagcaaaatcagatcatcaaagagttgacgccagaagaaacggccgcttttttacagcaaagcctagaaaacacccaagtgcaagctggcaaagatttttctgaatggctcaacaaagccaaggcggaaattgctggaaaacgaggcaagcaaaaatgaagattaaaggcagagatatcaagatcatggctgcggtccttttcagcagtttgatgcttccgcagacggcgtttgcgctcgacacggaagacgtcagctccaccatcaacaatttattgtcgaatgggaatggctcaagtgatacgatcaataccttcttgttgctgacgctgctttccctcttaccggtcttgctgatcatgatgacctcttttactcgtatcatcatggtcttgtcctttgtgcgcagttcgttaggtacacagcaaaacccgcccaatcaagtattgatcgggttggccttattcttgacattttttattatgaaacctgtgtataccgacatctaccagcaagcgatcgaaccgtttgatcgacaagagatcagccaagccgaagcttttgaccgctcagaaaaacgaatcaaggcctttatgatggtacagacacgggaaaaagacattgccttgtttgcggaagctgatggggagaccgaaaagtatcattcttctgacgatgttcctctgaccgttatggtaccggcttttattatcagtgaattacgaacggctttcagtattggctttttgatttttatcccctttttgatcattgatctggtcgtctccagtatcttgatgtcgatggggatgatgatgctgtcgccgatcatgatctcactccccttcaagatcttactatttgttttagtggatggctggtatctgatcgtggagtcgctgatcaagagttttcaatagccgctaagaaaggagccaagaggaaatgacagtagaaatggtacttgatgtgctaagggaagcctttcttcgaattttagcgatatctggccctgccttattggtcggcatgctcgttggattggtgatcagtatttttcaagccactacccaaatccaagaacaaacgttgagctttgtgccgaaactattagcgatttttttgaccttgattttggccgggaattttatgctgaatctcttgttgaattttaccaaaatgatcttcaagatgatttcagcaatgtaaggaggaaacctgatggcgccgattcaagcgacggtgttgattttttgtcgattattggcgtttgtcgtcctttgtccgatcttctcacagcaaaattttccgtcactggcaaaaatcgtgatcggcatggcgttgacggtcctatgtctgccgacggcacctgcgattcccgagctttccctctttatgatgacggttttcgtcatcaaagaagtactgtttgggatggcgatgggctatttgagtcagctggtctttaccggtgtggaaattgcgggccaattgatcgactttcaagtgggtttttcgatggcgcaagcctatgatccgacgttgcaaatcgcctcttcccagtatggcaaaacgtactattggctgacgatcgctgtgttttttggacttgatctgcatcatcgactgattacagcactgctgttgtcttttcggatcgtgcccttaggctctgtggtgatccaaggcacgacggttgaaggcatcgtcaaacttttcagccaaatgatggtgatggcagtcaatcttgcagcaccaatgatcattgcgctgctgttggtggacctcgtgctaggtgtgatttctcggtcgattccccagatcaatattttgatgatgagtctttcgatgaaaaccgccatcagttttgtggtgtttctcttgctattacccaatgtcctttcgtacttaggcaaacacttgccagatacggtccgctacttgcaggagtttatcaagtcttttcaataaagtaacaggcagccagcaggaggtgagaagatggcagaaaaagatggcaaaaccgaactacccagtgccaagcggctgcgggatgcccgcaaacgcggggaggtacctaagacccaggaattagcagctgctgtttcgctactggtcttctcgtttttgactctgtctttatggcagtttttcgccgcttcttttttgccttatttttcccgaagtttggcgcagctggctgattatcaatccagtttggcggatctgccgaaactgggggtgcagagtatcttgctgctgcttttgttgtgtgcgcccgtctttctggtcgcgctcggagtcgggcttattacgaattatgcccaagtcggtctgttgttttcaggaaaggccgtcaaaccagactttaaaaagctgaaccctatcagcgggatcaagcagcaattcagtttgcgctcgttgatgaatttaggcaaaacattggcaaaattcggcgtgatcgtctacttgtgctatcaacaatttttagccgccgtccctgttttactgggtttgagtgaagtggggttggaaaaaacgatcctgttcatgctgctgcgggccaaagaattgttcttacagatctcgattttcttgatcattttggccgtagtcgactacggctaccaacgctatagccatcgcaagaacttgatgatgagcaaacaggaagtcaaagaagagttcaagcaaatggaaggtgatccgcaagtcaaagcacagcgcaaagcgaaataccgtgcgatgacccaaaatgccatcgccaacgtcaaagaagcgacggttttgatcaccaatccgacccatttcgccattgcgattcgttacgatgccagcagtgaaggggtgccacgggtcttggccaaaggggcagatcagctggcgcagcggatgaaagcagaagcactgaaagaaaatatcccacaaatcgaaaaccgtgaagtagcacgggccctttaccgtcaagtagaacccggggatctcatccctgttgaaatgtatgaagccattgctgaaatcatcgctttggtctatcagctagaagaaagccaacgcggcaagatttaaggaaacaggaggaactaaaatgaatgaggctgcctcaaaaccgaaaaaaggcattggtctggcggatatcttaatctcggtgatcgtcctagctattattggtttgattattattccattaccgagtgcattattagatattctgatcattatcaatttgacgatcgcgatcaacattttactgatcaccctgtttaccaaatcagtgttggaattcactacgtttccaaccttgctactgatcacaacgatgtttcgtttaggcttgaatctatcttccactcgtttgatcttgacccaaggaaatggcggacacgtgatcgatgccttcgccaatgtcgttgccggcagcaattacatcgtggggatcattttgttcgtaatcatcatggtggttcagctagtcgtcgtgaccaatggtgcagggcgtgtctccgaagtgactgctcgattcacattggatgcgatgcccggcaagcaaatggcgatcgattccgacctaaatgctggtttgatcacggaagcggatgcccgcaaacgacgaaaagatctgcagcgagaagctgatttctttggttcgatggatggtgccagcaagtttgtcaaaggggatgcgatcgcagggatcttaatcactgtcatcaatttagtcggcggagcgatcattttctccatggggggacaaatgaccgtcatggaagccttcgcccaattcgggaaactggcgatcggggatggcttggtcagctcgattccctctttactgatttcgattgcttccggggtaatcgtgactcgttccgataacgatagttcctttggtttggatattgcggcagatgtgatgcgtaatccccaactgtttcggatcgtgggggcgattctcttcgtcttagccttagttcccgggtttccttttgttccttttgtgttgattggtttaggccttttcgcagccagctttctggttacgcaaaaagaagaaaagcagcgagtggaacaaaaacaatgggaacaaaaattggcactagaacgcaaaaaagaagcgcaggaagaagatgattccgtggcttctttccaagtggaaccaatctcagtggaaatcggttatggtctaatccctatcgtggatagttcggtcgacaacagcttaatgaaccgcattgtggcgatccgtaaacagagtgccagagaattagggatcttagtcagtcccgttcgtattcgcgacaacctctatttggatgccaatgattacgtgatcaagattcgtggcaacgaagtcggccgcggcgatatttacccgaacaaagtcatggtgatcagcccgaatgaagagccgtttccttttcaaggaatcgcaacaaaagaaccagcctttcatctggatgcaatgtggatcgatgaatccgataaggagatggcggatctgcaagggtttacgattatcgagcctttgactgtgatcgcaacacacttaaaagaaatcatctatgcccatgcaccagagctgttaggtcgccaagaagtcaagaaattattggagggcatcaaagagcagtacaatgtcgtgatcgatgaattgatccccgatattttgcggctcggcgaggtccaaaaagttttacaaaatttattggatgaacaaattcctatcaatgacttagcaacgatcttagaaaccttagccgattacggcgttgtcacgaaagacgtagaagttttgacagaatatgtccgccaagcattgaaacggacgatcgctgccaagtatgccaatgaacgacacgagctgcaagtggcggtgatccagccgaaactagaagaaatcatcgctcaaagtatccaaaaaaccgcaactggctcgtacccggtcttaaaaccagataccgtgaccaagctgttggattccatcagtgggatccaacatgcggcgattgctcaaaatatcaatttcgtcattctggcatcgcctaagatccggttagcattcaaaaaaatgattgtttttaatttcccagatatcgccgttctttctctaaatgagattcccaatgaaattgcgatcgaaacggtgggcagtattgacatttaagcagaattttcttaggaaggggcatcgccgatgtatgaagtcgatcgagaagcggagatcatcaagtatctgccgctagtggaacgggtggttcagcgcctgtctatcaaaaccgccgattatgaatcaggtgatctctacaatattggggtgattgggctgatggatgccttgcggaaattcgatccctcaaaaaaagttccttttgaaagctatgcagtgattcgcatcaaaggggcaattattgatgaagtacgcaagcacgccaaaatctcccgttacaaaatggcggcagtcaatcagttttatcaagcacggcaagagttggagcaaagcctcaaaagagaagcgaccgatactgagatctgcaaacagctgggaatcaaccaaagtcaactagcggatatttatgagagtttgcactacttagccagcgtctctttggaagataccttgtttgcttaccaagaagaaggcatgacgataaaggatatggttcgggatcctgccgagaatgtcgaagataccttagtcgctgaagaaaaacgcaccgctttggttgcgtgcatcaaaaaattaggggaacgggaacaaataattttaagtctgtactataccgaagaactgacgttaaaagaaatcgctgaaatcttagaaatttcaattccgcgggtctcacaaattcacggcaaaacgattgccaaattgcgcacattgattgaggaggaactggcatgattcgaggattggatgtcttatcacggaacatttcattattacaaaagcgacaagagacgacgagcggcaatattgccaatgtcaatacaacagggtatcaagcaaaagccttgtttcagtcggcactagatgaagtggcgctgcataattatcaaagcgggcccaatgcggatactcgccgcgatatcggtgggttgtctttagggacgcaactggcaggtagtacgatcagccaagaccaaggcgccgtcaaacagacgggacacgccagcgattttgcactgctttccgaaggctactttgtcgttcaaaacaatgcgggtcagcggttgtatacgagaaatggcgactttaccgtcaatcagcagaatcaatacgtaacacaagaaggctatcttgtcttgggtgccaatggacaagcagtcagcgccttgggaccagcgaactttcagatccaatcatttcccccagaagcactgactacagatggtcaaaactacgtgactagcaacgcagcaggaaccaatgtgaatgcaccagtaatccagcaaggtgccttagaacaagccaatgtatccgttgccgatgaaatggtggcgatgatccagacttctcgggaatttgaagccaatcagaaagtcttgagttcaacgaatcagacattgcaaaaagcggtcaacgaattaggaaagatttgaggatgagtcaatgaatatcagtggattactaggaatcagccgttctgggttgaatcatttgcagacaaacttagacacgacagccaacaatatcgccaacgtcaataccaatggctaccaagcacaaacgacgcactttcaagcattgatggaaaatgccatcggtgcagaagaaacgctgtttaatggcaacaccgcccaatatggtgcgtcaatgggggcgaaggcaaccacgaccacaagttttgcccaaggcaatctggcgggcactgctcagccattagatctcgcaatccaaggcaatggctttttcggggttcgggaccaaaccggtcaattgctgctgagtcgagcaggcaattttcatttaagtgagaacaagcaattagtcaatagtgaagggtaccctgtggcaatgaccacaaacgtaccgacccctcagtggccggatgcgcagcaaatcgcaatagatgccagcggtcagttgacgacggaagaaaatggtcagactcgagtgttgggacagctgaccctttatcagccgacgaatacagaaaacatcacgccagtgggcaaccaactgtacagtgccggtgatcaagcgttgcttacttcgcaaaccaatccggcagcctttggcagcgtcttgcaaggacagttagtacagtcgacggtggatctagcgacttccatgacagacttgttaacgacccagcgtgcgtatggactgaatacgaaagccatgcagacagccgatgagatgtggtccgtgatcaatcgttttacagattagaggagaaagaacatgattcgcttaaccaaggtcagtaaaaaattcagcaatggcacgttggcattggccgatatttctgttgcgatccctcaaggagaatttatctatgtggtgggtcccagcggtgccggcaaatcaacgttattcaaattgctcttgaaagaagaagaactttcggccggttctatccaagtcggcaatgtcttgttggaacaactcaaagaccgtcatctctatatgattcggcgacaagtcggtatcgtcggacaagaagaccttttgcttccttatctgacggttgccaaaaacgtcgactatgcgctgcaagtactaggcactccccgcaagctgcgccaggaaaaaaccgccaaagcgctgcaactggttggcatgtttcctcaaaaggatcattatcccgaagagctttcagtgggacagcgcaaaaaagtagcaatcgcgcgagcgatcgtcacagatccagcagtcttgattgccgatgagcccaccgccaatctggatgcgaaatcagccgtcgaagttatgaaactgctcttgcggatcaatcaagtcggtgccacgatcctattggcgacccatgacagtacgatggtcaatacggtccgtaatcgggtagtcgagctgcaaaacggtcgtttggttcgtgatgaataccaaggcggctatactcgctttgctgatccaaaagatacatatgtctggtgaagatgcttaacttttctagcaaaagatccgattaaagaactagaagattgttttcataatcggataaagaaggagtgacccaacgattatcaagtgaagagcgaatcttgataaacagcacgactgatcattttgcataagaaaggatactgttatgaagaagaaggtacaagctatcatcaaaaaaatccgcttagcggtgttgattccgctaggatttaccctgatcgtattattaggatgctatttcttcgtgatccgcacccacggagacggacaagcagcaaaaagtttctttattttttcagtgatcgtactgctactagaaattgcagtgttagtaggaatgacctatctagcaaaaaaagagacccattcaggcatggatacgttgttggcagaactagaagcagtcggttctggcgatctatcccatatcgatgagatcggcagcagcgaccaaatctccctttttgggcaagttcaaaatcgttttcaaggggttttaaacaccttcaaagcggtgatcgttggcatgcatgaagaaagtagccggatggaaaaaatggtaggcggtctaacgacaacctcaaaaaatgccaaaaattcaattgaaaatgtgcgtcagacgatgaacgccatcgcagatgctactagttcacaagcctccgaagcggaacaaacctcctttgatatggacgaattagccttaagtatcgaagagatccacaaagagatcgaattgatgaacgggtatgtcggtcaatcccaaagcagtaatgtccacaattcagaaatgatgttccatgtgtttgaaagttgggagatcgaacggcaaaaccaagcagaattagtggaaagcatgaacgacatgaatgaagatgtccaaagtatcggaaaaattgttcagctgatcaatgatatttctgaccagaccaacttactggcattgaatgcatccatcgaagcagctcgggccggggaagcgggccgggggtttgccattgttgcagaagaagtccgcagtttagcggaacaaagcagtcaatcaacgaagagcattcgttcgatcattgaaacgatccgcaaaaaatcggaaaaagtggtctctgcagtgacggattcctttgaaagcggcgaaagacagaccaacaatattaacaaagccatcgagtccgctaatgagatctctgacattgtcgaaaaattggtttcaagtatccaaacagttgaatcccatattatcgggatcgttgaaaaaaaagacatggttcatgtttctgtcagcaatatttctgctgccgtttctgagacctctgctgggacgcaagaagtaaccgcaaacctagaggacttctacttggtcatcgaaaattttgaacagaatgtacaagaaattgagacaatcgctaatattcttaaattccaagtggatagtttcaaattctaaaaaggagcggtgacgctaatggaacaatacgttgtatttaaaagtcatcaacaacactttgccttgcggatcgattatgtggtaagggtcattgaggctgcctctttcacacagctgccagaagtggcggattttgttctgggtattcaacccattgaagaggcgatggttccgatcattgacatccgcaaaaagctgtttgatgaatttacgccggaaaccggacaaaatgtggtcttgttgtgtcactggcaagaacaggcgatcggtctttacgtggaagagatcgtcggcattctacccttagccgaaagtcccagcaatgcggaattaaatacgtcaggacttaagcaaaactatatcgaagcctttctgaaaaaagatgatgaacttgtactggcattggagctgccgtttctcttcagctatgaacaagcggcagagatgaaggatgagttaggcgcctatcagacagagaaattggcagccgccaatgacgatgacaatgatgaccgtgaatgaggaactgcatgtggggatctcggagtataagatcgcccaagcgccaactcgtttgatcacggtgggcttaggttcttgcatcggcacgatcatttacgacgaagccagtcatattggcggcttgagtcatattatgctgccagatagtcagccttttttgcacaagcgggaaatcaagcccgagaagtttgcggacttggcattgccggcgatggtcgccgagttgaaactaaagatccgccggcctcgctttcaagcgaaaatcgttggcggcgccaatatgtttcagttccagacccttaatgctgccagcaatattggtcagcgtaacattgaagccgtcgaggaagtcttggatcagctaaacattccgatcgtggccaaacatgtgggcggcagcgctggtcgaaccatggtcgtagaccttcaggatttcaaaaccatggttcggcaagtcaaacaagaaatcgtttatttgtaaaaggagtacagggatatgaaaaaagtaatgatcgtcgatgattcggcattcatgcggaaagtagtgacagatttattgaatcagttgccggatatcgaggtgaccgtcgctgcccgcaatggcaaacaagcattggattatttgaccaaagaagcgatcgatttggtggtaatggatgtggagatgccagtgatgaacggattagagaccttgcggaagatgaaacagcaatcagccattccggtcatcatgcttagctcattaaccaaccaagaaaccacgattgaggcgttagcgcttggcgcacgagattttgtcgaaaaaccagtcagtctatcgatgatcgaaaaagaatggatcgctgaatttcatcaaaagattttagcgatggatcatgaagccggcacagctcaagcactggtgccaacggctgcccaacccactaagctgacgcaaaacagcttgtcgtctcatcttgacgctctggtcattggcgcttcaacaggcggcccgcgtgccttactgggcattatccgtcgcttgcccgcgcatctgcgctgcccaattttgatcgttcaacatatgccagcgggatttacggcttcctttgcgaagcgattagacacagagacaaccgtccgagtacaagaagcaatcgacggcatgcggattgaaaatcaagtgtatctttgcccgggggattaccacatgacgatccaacaaggacatttgcaactggaccagcgagaaaaacggcatgggacgcgcccaaccgtcgattatcttttttcctcagcagccgattactatggtgcgcaactagcggcggtcgttttaacggggatggggaaagacggcaccgctggtttacgacagatccaaacggctgggggctatacgatcgttcaagacaaagaaacgtgtacagtttttgggatgccgcggtatgccattgaacaaggagtcgttgatgaagtcctgccattgcaggatattgaagcaaaaattgcacagatggtcgggtgaagaagatggaagaagaatttgccttatttaatgcatgggtggatcgccggttagggattccattagccgcatacaaagaaaatcaaatgcagcgccgcatccttacgatcatggaaaacagcggggcaaaaacgttgagggaataccagcaattgatcgaaggagatgaaggggtgcgggcagcttttttagcccatatcaccattaacgtaacggaattttaccgcaacaaagaactatttgacgcctttgaacgcatcttgaaaaccattgttctcccgaaaaccacgctgccaaaaatttggagtgccgcatgttcgattggggcagaaccctatacgatcgctatgctgctagaaaaaaaccaaattgctgcagccaatgtcttggccaccgatatcgatatgcaaattttggcaaaagccaagcaaggactctatcgagagcacgaattgcggaatgtctcagcggcagaacgtacccgtttttttgatgcaatagaaaagaaccagtttcagatcaagacagaaatcaaacggcgggttcattttaagcaacacgatcttttgaaagacccgtacaatggaccttttgatgtgatcgtttgtcgcaatgtgacgatctatttcaaaagtgacgctcgggatgccgtctatcaaaaattcagtgatgcattggtcccagggggcattttgtttacgggagcgacagaaacgatcaatttcgcggaacaattcggtctcaagaaaatcgattcgtttatctatcaaaaagtataattttgtaaaggagggacccatttggatgacaatagtgtctatcgtacccttttctttgaagaaacagacgatcatttagcacagttgaatgatcatgtcttgcaattggaaaacgatccacaagacagcgccttgctgaatgatattttccgttctgcccatacccttaaagggatggcggcaacgatgggctatgacgtcatgacgcagctgacccataaaatggaaaatatttttgagttgtttaaaacagggaccttgcaagtgacccagcaatcgatctcattgattttcaaatgtttggatcgcttgtcagaacttgtggaggatctgcgggaagaacgtgacctgcagccagctcaaattgccgatttattggccgaacttgaccaaacggaacattctggcggcctaccaaccgagacagaagcaagtcaaaaacctacagcagcgggcgcattaaacccacagtttcaacagatcgatccttctgatctgtacgtgatcgagcaagcggctggagatggctatcaagccgttcaaattgctgttcgcttagatgcccaatccatgttaaaaggcgctcgtgcctttttgatcatggaaaagcttggtcaaacaggggatgttctctatgcagaaccagatgcccaaacactcgaagaaggcacctttgaatcggatttctcgctgctgtatttgacacagcagacactagctgatgttgagcaaaacatcgccagcaatagtgagatcgaagccttcgtggtggcaccttttgatccatcagccgctgtgttggaagaggcagaagagctgcttcagccagcgtcggcccaagagtcagaaactcctgctctccaacaagcgaaaacagaaacgaaagaaaaatcaccggcgctagcacatcatgcgtctgcccaaaatcaatcaatccgagtcgacttgaatcgcttagattcattcttggatctcgtatccgaattggtggtctatcgcaatcaattagaagatgtcagtgagcgggaaaacatcgaagcagtcaaagaccccttagaacaagtttcacgattgacttctgagctgcaagatttggtcttgcggatccgcatgcagcaagtcaatgtcgtcttcagccgctttccaagaatggttagggacttatccaatgaactgcaaaaagaaatggaacttgtcatttttggggaagaaacggaattggataaaacagtggtttctgagttgagcgaacccctggtccatctgttgcgtaattctgccgatcacggcatcgaagcacccaacgttcgggaaaaactgggcaaacctcgcaagggcacgattcgtttggcggcctaccaagaaggtaatcgcgtgatcattacattagaggatgatggcaaaggccttgatccacaagtaatcaaagcaagtgctgaaaagaaaggcttagccacggcaggcctttccgatgaagcgttgcagcagctgatcttccaccccggtttttcaacagcccaagaagtgaccaatatttctgggcgcggtgtcgggatggatgccgtgcaatcgaagattacccaactagggggaactatcgagatgaagagtcagccgaataaaggcacgcagtttgtgatcaaattgccattgaccctgtcgatcattcaagcattgatggttcgcgtcggcgaagaaacctttgcgatcccattaaatctagtcgaacgcgtggtgatgatcaaagaagaagagatcattcagacggtctcagatgaggtctatcgttttcaagaagagttgattccgttgattcggaccgatcaactcttagcgatcgaaggcgacctatctgagaaaaaattcgcaattatcgtcaacaatgaccaacaatttcacggtattttggcagatgaattgatcggccaacaagagatcgtcatcaagaaaatcgatccgctgctgcaaaagctgaatcgctatcaaggagcaacgattatgggtaacggctcgatcgcactgatcttagacattcatgcgatctgtcagaaaaaaaaggatgaccgcttatgagttatacagcgctgcagatcgatggactaaaagaactgatcaatatcggcggtggccacgctgcgactagtttatcaaagctcctccaacaaccgatcgatatgcgggtaccggaagtcgagattctagcttatgaggatttgtatcagcagatcatggcggaagacaaagaagtacatgtggtgataagtcaaatcgaaggggcgtttcgggggatcttcttgtttgtcttaacggatgaatccgccgcaaaattgcgtcagttgatgatccaagaaagcgatccgtcagaagagttgaagcaatcagtcatcaatgagttgaccaacatcctcaccaattcttttttgatcgcgatcgggcaactgttggaaacacagctgagtgcgtctttaccaagtgccagctatgatttctttggcgcagcgatcagttccatctatttggcaatggcccagtatgatgagcaggtgatggtaatccgtaatgagttcgtctatgccaaagaaacattagaggcatcgttatttttgattccagaaatcggtgtactagaaaacatatttgattcattaggaatttgaaaggggcaaatacaatgtcaaaaaaagtattgatcgtggatgatgcggtatttatgcgcatgaaattaaaggatattttagaaaaaaacggctatgaagtcgtgggggaagcccaaaatggccaagaggcttttgaaaaataccaagcaacgacaccggacttagtgaccatggatatcacgatgccggaagtggacggcttagaggcgttaaaaatgatccgcacgtttgatgcgcaggcgaaagtcgtgatgtgcagtgccatgggacaacaaggaatggtgatggatgcaattcgcgccggtgcggtggactttatcgtgaagccctttgacacggaccgcgtaatcactgccattgataaagcctttgcctaatgcctaggaggatagcgacatgcagatgatacttttcaaaatggcccagcagtactatttgatttcggcggactcggtggacgaggtcattgatgctccttcctttacgaaggtgcccttagcacctgagtgggtagaagggttgatcaacctgcgggggtctgtcgtaacggtgattcgtttggcaaaactgattccgattatggaaccagcctacgaaaaaaatatattgatcatgaagaagcaagaggaaaccaaaggggtcctcgtagaagaagtaattgaagttcttgatatcaccgaagaggatatccaactagacaatcaagagacagaacatgccgttggagtcgtgacgatcggtgaaaaagtagccagtgtgattcaaatcgatcacatgattttttaaaaaaaatgggggattagtgtggatcaggtattgacgcagcaagagattgatttattgttgaatgcgatgagcagcggagagatcgatcaagaaattattgagatagaagacaaacaagccaaagtgaaagcctacgattttcgccgaccaacaaagctgtcgaaagagtacgtcaataccctgcacatgatcttcgaggatttctcgaagatgagcagcagcatgctttctacccaactgcggaccaatgtttctttgcagttggcagctatcgaacaagtcagttatgacgaatttatccattcgataccaaaatttactttattggggctctttcattcgcagcctttgagcgggatccagatgatcgagatgaacccacaactgtgcatgatgttggtagaattgttgtgcggcggtttagatgtttatcaaaacaagccgatcgaaatggattttagcgagaaaaaaagttttactgatattgaaacagcgatcttggaagaagtggtggcacaatttgtacgggtctaccaaaatgtttggaaggacatcgttgccttggattcggttttggatggaatcgatacgaatccgcaattgatgcaaaacatgtcgccgaacgaacccgtcgtattagtgacctttactatcaaaatttttgaagtgaaacatttcatcaatctatgtatcccgtacgtcttctttgaagggatcattgataaattaagtttccgcaattggtttgatagcaatcagccagtcaaccaagacgatagccgcgagttgcaaaaaagtttgaatggggtcggcttgaatttagaagttctgctgggccatgctcaaatgagtctttctgagtttctccacctagaagaaggcgatgtcatcaaactagacaaaaaaattactgaaccattagagaccttcatcgatggaaaaccttacttccgggcaaaacctgggaagcaagaggaccgtttagccattgagttattagacaagttagaagaggagcaaaaactatgagtgaacgtttatcccaagcagaaatcgatgcattgttgaatcaaagtgccccagcccagccgcaaggattagaagagcaagtcaaagtcgacattattggcgaagttggaaatatctccatgtcgcaagcggcgacgacgttgtcttccattcttgatcttcgggtcagtatcacgactccccgggtgtctaaaatcaaatttggtgagatcttaaacgacctcgttgcaccaaaagtagcaacgacagttgaatttaaagaaggccttttaggcagtaatttgatgctgttagaagtcaaagatgccatcgtgatcgctgatttgatgatggggggaactggtgaacccaccaacacccaatttacggaattagagctaagcgccgtggcagaagccatgaaccaaatgattgggactgcctcgacttcgatggcgacgatgatcagccgcaaagtggatatcttgccgccgatcgtcaaactatgggagacaccagaaaacattgagtatagcgggatcgaggcagaggaagagatttactgtatctcattttctttgcgcgtcgaaggtctgatcgaaagcaaaatcatgcagatctttacggatcctgtggtcaacgatatcgccagtgcgatgctgtccgatgaagcgactgtcgttactcgggaaacaccaacaccgcagccaacagcacccgttgctgcacctaagccagaaccagaggctgcatcaaagcccgtggaggtcagcaaaccggcatttcaaacattggcctccagcggagtgaacgatggggataatttggacttgatccttgatgtgccattggatctaagtgtcgtgttaggccgcagcaaaaaaaccattaaggacattttatctttcaatacgggctccgtcatcgagctggaaaaactgacggatgaaccgctagagattttgttgaacggcaaactgatcgccactggggaagtcgtggtcatcaatgaaaacttcggcgtacggatcaccaacattctttcgcaaaaacaacgcattcacaatttgcattaacttgaagaaatcgcaaaaagttaaacatatgggtttaacttttttgtgatttgaccgatagtagagggtagaagaatgagaacggaggagaacctatgaaaatcgaaagaggttacgcagaatacagcgacaaggccatcaaacgcgatgcggtcaaacaagaaaagccaactgctcctcagacagaaaaaaccgtcgatgttcaattgtccgaaacagctcaagccattcaaaagagtgccaatcaaacagccagtcgcagtgagcgagtggcagaattgaaacgagcgatcaaagaaggcacctaccaagtatctgccgaaacgatcgccgataaaatgctgcagcaagatgaaaagcaggtcgactagatgacagagcgggaatttgagcgtcagcttcagcagttcttgcggttgctgcaaaaagaaaagacctgcttgatcaaaaatcaagcagaaaaattaccagaactcgtcgagaaaaaaaccgccttcgtacccgttttttccatgtatgaaggaactctttcagcggcgatcaaagaactcatccgccagatccaagtgcagcaagccgagaatctcctgctgacggaacaagccattagtttccaaaccgttttgatggatgcagtcaaagaaaatatcaagacaccagcaaatacgtattcgaaataccaagaaaaacaagttgtctcaacagcgatcatcgatcaaaaaatgtaaggagtacttctatgacaggactatttggttcattaggcaccgcaacccggggcatgaccgccaatcaagcagcgttgcaaaccagcagccacaacattgcaaataccaatacagacggctactcaagacaacgagtcaacttgcaagccgaagcgtcttatcatttagcgggcgtcggcagcatcggtatgggtgtgaaagtcggcagtgtcgaacggatcgtcgatgattttgtcattggacaagtacgcaatgccaattctacctatacatattacgaacaaaaagcagacatattaggacagctggaaagtttaatgaatgagccttctgacaatggactgtccaaacagctggcaacgatgtttgattcttggaccgcattagccaacaatcctgaactggatacgtctaagaccctcgtgctggaaaacagcagtacgtttgccgataccatcaaccaaatgggcaaacaaatgacgcagttgcaaagcgatacgctggataccatcgaaaaatccgcgctggacttcaatgagaaggtcaaacagctgcaatccttgaatgaacagatctatgggttgacgacgagtggtgaaacacccaatgatctcttagatcgtcgagacagtctgttgaaagatctctcgggtctagcagggatcgaaaccaagaccgatcaatatggccgtgggtttgtatccatgagcggacagacgattttaagtgctgaggaacgcaatacccttagtgtggtggtgggacaaagcgacacaggcgccttggtttccaaagacggcaacgccttgaatcctgctgaaaccattacaggatcttatccagctggaaccatcttgttgacgaaaaccaccgacaatggcgacaccgcctatacagaattgccgatcaaagaaggcgcaatcggcggcctgcaagcatcatctggtgagatcggcagccgcttgacggaattgaacaactttacgacgacgatcgcgcaagccatgaacatggtctttaccagcggcgcttctcgtactagcggtctatttgagatcggccaagatgatactggtacagccacgacgattcgggtcagccaagcactgttagataacccaagtctggtggccggcggaacgagcaatgcagcaggagatggttcaagagccgctgcaatggcgaaactcagcagtgccaaattggatttcccattgtcagaaaagacgatcgcttcttttgatcctgagacattgacgtttgctaatgcagcatccggaatgagtgtcagcagctattttaacagtatcgttaccaaaaacgggatctcaaaacagcaagccgacaatacggtcagtgctcaattgtcactgctgaatcaactagaatacaaaaatcaatcggtgtccggggtttcattaaatgaagaaatgtcagatgtgattcgtttccaacaaggatttcaggccaatgcccgcgtattatcggtcgtttctgaaatgttagacacattgatcaatcgaacaggagtgtagaccatgcgtatttccaattcaatcacctacaatgattttttacgaaatctaggaaccaacgcctccaaagtccaatccacgttgaatcagctatcgagcttgaaagaagtcagcaagtcctcggataatccactgctggtttcaaaaatcatggatcttaatgtgtcgttaaatcaaaacaaaacttacaacaatacgatcaaagacagtatttcttggacaaaagctcaagattctgctttagaaagtgttagtacctcgatgctgcggattcgctcgttggttcaatcttctgccaatgcaacagccggcagtgaggaattaggcgcaaatcgttcagagatcgagcaagagatcgaaggcatcgtggaatcattaaataccaactttgatggtcgctatctatttagcggaacgaatacgacgacggcgccttttgagatcgtcaaaaaaaatgacgccatcgtcggtatcaaatacaatggctctagcgaagacttgccccgagaaatcgcaaacggggtctcggtggatctgttagccagcggtgatcgtctgatgaacgagacgggtacagctgcggatccccaaaatttaagcacctacttcaatgatttattgtctgcgttgcgcagtgatgataaagatgcattagggggcgagcttttaaccgctcatgaccagcatgccactaatgtggtgaatgtacgggcgcagatcggcactctctacaatcgcttggaggcagcagctgatcgaaacgagacggaaaagctgaacttgaccgaaacactgtccaacaaacaagacgtcgatattgcggaaaagtatatggaatatcaaaatcaaatgactgcctatcgttcaacactagcgatgggaacaaaaatcatgcagatgtccattctagattacttaaattaacccgaaaacttttgttctttgctgagagcaaaagttttttatttttttttagaaaaaaggcttaatcctgaatggtttcttccgataaatagtagcagagggaaaccttagcgaataaaaattaggaggaactacacatgagaatcaatacaaacgtttcagcattgaatacttactcacgcctaacggcagccaacgcttctaaaagcaattctttgtctaaattatcttcaggcttacgcatcaacaaagctggggacgatgcagctggcttagcaatttctgaaaaaatgaaaggccaaatcggcggtttgtcacaagcaaaaagcaacgcacaagatggtatctcattgatccaaacagcagaaggtgcattaaatgaaacccacagcatcttagggcgtatgcgtgatcttgcggtacaaagttcaaacggtacgttaagtgatgacgaccgcagtgcgatcaacaaagaatacaccgcattgtctgatgaaatcgaccgtatcagggataccactgaattcaatacaaaaagcttgttaactggtgaaggcgatgatgcgaaatcattcactttccaaatcggtgccaacgcaaaccaaacaatgagcgtttcaatcacaaacatgagctcaactgccttgaaagtaaaaggcttagatttaacacaagcatttgccacaagcgatattgctgcagcaaaagataaagcagtagcggctgccttcaaagcagatacaacaacaaaatatgcagcggacggcaaagttgatgcggcagctggtaaaacagttgccgatttacaaacagccatcgatacagcagcggatgatgcagcaaaagcaacagctcaaaaaacatacgatgatgctttagcaacatttaccgcttctgatgaaggcaaagcagcagcagcagcagcggaaactgccatcgttgaaaacaacccaatcacaaaaatcgataaagcgatcaaagcagtttctgcacaacgtgcggatcttggtgcggcgcaaaaccgtctagaacacacaatcaacaacttaggtacaacgcaagaaaacctatctgaagcaaactcacgtatccgtgacgttgatatggcgcaagaaatgatgagctttacgaagagcaacatcctttctcaagcagcaacttcaatgttggcacaagcaaactcaatgcctaatagtgtattaagcttgttacaaggataattttttgatcagaggaactactgacacaaggactgcctaggggaagcacagttcttgtgttttacatagcagcacaaaaacgcttagaaatgaggaagctctgatggatattcagccaatttcaggaatacacccgatcgaagccgttgcgtcggtcgctaagacacggccgattgaagccgtagatcaagaggccaccaaccttcgctcgcaaagcaaagggcgtggattaacagaggaaaaggaacggacagtggcaactgaaccgccgatccactatttttcagcagccgatcagcacaagatcggagtctccgtggatgaagtgaatcagctgctactgggcaaagatatgaaattggcttatgaagtgcatgagcgcacggggcggacgatggtgcgtttggtggatatgcagaccaacgaagtcatcaaagagatcccacccgccaacatgctagatgtgattggaaaaatatgggatgacatggggatcgcggtcgatcgaaagggatgaaaatatggcaagtgtaaccagcagttcaggaatcagtacaacgctagggagttattctggcgtgacttcagaagatattgaaaaattattggcggcagatgcgatcaataagacccgcgctgagaacaaaatcacgtcgcttaaagcacaaaaaacggcgtggagtgatatcagcactcgcctgacgaactttttgtcaaaagtcgatgcattacaaaaagatgatgcttatcaaacgaaaaaagcgacgaccaccaatagcagtatcgcttcaattgcaggaacaacggaagccccagaaggtacctatgatttaaaaatcaaccaactagcaacagccacgaaggtgacggggagtcaagtagctcaaagcagcaaaacagctctaaatgtcagtggtcagctgtcattgaccagttcggaagtagatgaaaatggcaaaccgatcaccgcttcgatcgagatcactgctgaagacagcttaaaagatgtggcagctaagattaatagccaaagcaagacgaccttcgttgcggcgagtatcgtggataaccgcttgattttaacgaataccaaaatgggcgacaaaaatttcttgatcgacggcaatgccgccgaagggttagggatcggttcaactgcgacaacgacgcaaggccaaccggctatttttgagctagacggcatgaagatcactcgcgacagtaacagtgtgacggatgttatcgatggtgtcactctgacattagctaaaaaaagcgaggagcatgtgacgctttctttagccaatgatacctcgaaagtcgttgatgcagtgcaaggattagtggatcaatacaatagcttgatgagttttatcgatgataatttgaccgtgggagatcctagtagtgaaaacaacaagacggggaccttggtgggagacagtgcgttgacccgtctacagactcaattgcgaaatttgatcaccattccagccgtcagcggctcaaagctgaccgctagtaagctaggcatctccaccgtcgataatgatggtacattgggactggatacgacaaagttaaaagaagccctagcggaagatcccgctgctgtgaagtccttcttttatgcaagtacgaaaatcaaagaagccgatggcactgcgagtacgaaagagaccggctatacactagcgctaaaagaattagccaacagctatgtcgtcaatacttcagccaataaagggatcattgccaccaaatctgcgacctatgacagtaccatcaaggatttaaacaagcagatcacacggtttgatgatatattagcaatgaaaaaagagcgttacatcacaatgttcaccaaattagactccgtgatgatggaggctgaaaatcagctgagttacctaagcaatcagtttgccaatacgtcaaactaggcaagatatacgattaaagcagtcattttttcattcgcataagaaaccctcgtcaacaagaaaggaaacaatctatggagccacacgtatcattagatgaacgtttgaatcagatcttaactagttttgcaaaatggcatggcgacagcgaagaagccggtcgtttgatggcagccaatgcagtggtcatagaagccatgcaggcagaagaacagagccatagtccccaaaccagtgtattggcgcaacaagtgatccaagcgtatcaagtgttcttagaccaggtcaaagcccagcagcaagagatcaaacaagaattaggacgtttgaaccgcaaaaataatcttgtcaaaacgtatttgcagcaagaagacaatgccgccttcgtcgaatttgatttatagtgaggataaaaagatgaattatcagaaaatgcaaaacaactacttaaagaatcaagtgatgagcgcgtcacctaacaaattgattgaaatgcttttgcaggcagcaatcaagaatatcaaattggctcagttagcgattgaaaaacaagaactagcaaaagcccatgaacacttcataaaaacgcaaaatattttgttggagttgcgtacgtcgttagacgaaaaacaaggcggcgaaattgctgaaggtcttgcagcattgtatgaatacatgtatcagcagctgattgaagccaacatcaaaaaagaagtggttcctgcccaagcggttgcagaactgctgagcgagttattagaaagttggcaggccattacccaatcagcttgatcaaatctaccgtttgcttgctgatagacgaaaagcaagtatgtattaagcatatatagagaaaaaaacaacgaagtgctgtttttagccgctcaaagtcgtaaacctcgcgtttgcggcttttttattgcgttgatgcacttcgtaattgtactttgtaaaaagttatagaaggtgtattttttttgaagctgaatttagctttcattaggggacgcttcaataagggggcgcttcattaaatttttacaatgatacccttttcaaaaaggcttattttttaccttatacgacaattctgttattctaaaaaataagaactgttttgcaaggaggtcatttagtgaaaaaagcagttttattcaagccgacagttctgcaattgctcgttattttctgtgtaagcctgctgctattgttgccgcaattgtttggccgtggcttgattttaggttcggatgccgtctttcattttaatcgtttttatgagacgagccagcaaatcaaagaggggaactatcaatactttctttccatttatgggtttcagcaatctggacggatcgtcaatgcattgtatggtccattttttgcgtattttcaagggatattggttttgatcagccgttcctggttccagtaccaacttttatcgaatgggttgctataccttttggcaggaacgtccatgtacacgttgctgcgaaaattaaaagtctcaggctggttgtctgtggggatgggcattctttttatgacgacgtattcgatccaatattgggtcgaacgacaaggcttttcggcttggggggcagcaatattgcctttttgtttcattccattgatcgatatgacgcgctttcaacggattcgtccctttgctgtaggggtatcagtggctgcgctgtttcaaatccatgttttttctagtattttattggttttgatctatattccgttctttttgcgcacttttttgaaaagccaagataaaaagcggctcttgctccatttaactgctgcaattggcatttttcttctgctgactgccaatatttggctggcaatgcttgatctttatcaaagcaatcaattgttaccaccttttgtgaatcaccatatggaacgaaatacgattacgggcaccagcagttattggtggacatccccctaccttttcccattggtctgtgggttgttttttgccggctctttgaagaaatggcaagagatatccaatggcttgaagctgatgactgtcgttgcgggcatttttttcctattatcgtctaactatttgccatggcaatggttatctagtctcgaaaacccattgatagaattgattcaatttccttttcgcttttttgtccctgcgacagtgctgattcttgcgggattgtgtcttttgcggccctatttagcggatagccgcctgaatcggccgatttggctgattttacttttagttgtcagtgtgggtcagatcatgttccaaaccagtaccaagatgagtgagtggcagtccagcgattccgcggtgaaaatcagaaatcactcctatctgtttgtttctgatcagcagacgctgaaagcggcttatttcagtccagacaaggccaaggcactggtgctgttccagcggtcaacccccgattatgttcccatctatcgtgacacaaaggaaaataaatacgatgcctatggggaacaaatcatcaagcaaaacacgacagtgcaaaaagcagtggttaatggacagttgattttgcgctggcaaggggacgattctagctggaaggcattaccggtcatcaattaccagcgaacgaccttacagcttaacggccagccattgacgcgttccgacatcagagtgagtacgataggggcagtgactgttaagcagcaggcaggtctcaatgagctgatcgtggattatgacgcgccttggtattttgactggggactgtgggtgacaatggctgcatgggttttattggctcttggttttctttggaaaaagcggcagctgtttgctgcagttagacgccaaaaataatcaagggaacaaatgccgacggccgctttccgacagcaaagaataatgaattggcttagaggccagagaagcaactgtagtgggcaacactccagcacttctctggcgtctaagtttttttaagaaaaatttttttggaattagttgcgcccgcaaccaattatctttatactgaacctactgtatttaccttacggcatttaaaggagaaaaattatggagtcgatcattcgttcaatcaatcatattgcccgtttagcctcattgtaccgagaaagagagctaaaaaaatatgggttaggtcccatgcatcatacgtacattctaaatgtctgtcgcaaccctgggatcagtcaagaagctttaggtcagttgatttttgtcaataaaagcaacgttgctcgccaattagcagtcttagaagaaaaagggtatgttcgtcggcaaacgagcagtttggatgggcggcgacagcttatttatccaactgaaaaagccttggcgatgcaacctatcctccaacaattgttgaagcagtggaatgagcaagccttagcagggttttctgaaacggaacagcaaaaattgctggcagatctgcaagtagtaaaagaaaactcgcagcgtgctttaaagaaagaagatgaggtccagtgaagctactaaaaaaatacttgcgcccatatattgggcgtatgtctctcggaatcagtatcaagttttttgggtctttgatggatctgctgttgccatggatcctagcctatatcattgatacgatcattcctacaaaaaatgtttccgccatattcttgtggggcggtgtgatgctgctgtgttcggtgattgctgttgtaaccaatattttggccaatcgtatggcttccagtgttgccagagatgctactggcagcatacgtcatgatctttttgccaaagtagcctatttatcgattcctcagatcgaacaagtcggtatcccttcactggtttcacggttgactacggatacttacaatattcatcaaacggtaggcatgatccagcggcttggcattcgagcaccgatcctcttactaggaggcgtattgatcacagctactttagatccagtgctaacagtcgtattagttggagttttgcccttcacattagttgccgctgttatcatttcgaagcgaggaatcccattgtttgcgcaattgcaaaagcgagtagacacactagttcgcaccgtccgggaaaatgtgacaggtgctcgtgtgatcaaagcattgtcgaaagcagaatatgaaaaacaacgatttcagcgagtcaatcagtcagttgttgcggcagaaacaaaggcgaaccgaacgatggctgccacaccacctttaatggattttttcctgaatgcgggtttgacattggtgattttagtgagtgcctatcgagtgaatgcggggctgacacagccaggggtgattattgcttttctcacctactttacgatcattctcaatgcaatgttaagcatcacgcggatttttgtgatcgtttcgaaaggattagcttccgcagaccgtattcaagcggtactgcgactaccagaagacatgaaggtcgttccccttctggcaagagaagatgaggcacacattgtatttgaccacgtttcctttacttatcctgatggtacgaccgtcctgaaggaaatcgatttttctctagacaaaggacagacgttagggatcatcggagctaccggcagtggcaaatcgacgattgtacgtttactgctgcgcttgtacgatccgaccaatggtcagatccgcattaatggccgtgatatccgctcactggatcctgcagagctgcaccaatattttggcattgttttgcaaaaagatgtccttttcgcagatacgatcgaaaaaaatattgattttgggcgccgcttttcaaaagaacaaatcgaagaagctgctgctagagcgcaagcaaaggaatttatccagcagttgccgcaacaattggcctatgaacttcatgcgcgaggaagtaatctaagcggtggtcaaaagcaacgagtcctcctatcccgtgcattagctggtgaaccacaaattttagtcctggatgattcagccagtgcattggattatcagacagacgccaaactacgccaagtacttaaacaacaatttgcggacacaacgacgattttgattgcacaacgaatcggttcgatccagcatgcagataagattcttgtgttggaaaatggccgcatgagtggattcggcgatcatgccacattactggcgacgaataccatctatcaggaaatctatcatggacagacaggaggaagaatcaatgcctagcaagacagtcgccgaaaaaccaaaagagacgaaaaaaactgtgaagcgtctctggcactatttgtatgaagcgaaatggcttcttctattatcagcagttttaatgatggctagcaatctgttttccttagtaggtccactgctttccggttatgccattgatgccatccagccaggtccaggaaaagttgtttttcaccgagtattcttttattgcggatggatgattgctttttatctttgttcagcagtgttaagttatctgatctcattattgatgatccgtctgagtcaacgtgtcgtccagtccatgcgcaaagcgattttcaacaaaatttctgaattgccgatcggctactttgatcgtatccaaacaggcgatatcattagtcgaatcagttatgatgtcgatacgatcaatacatcattagctagtgatgccatccaagtgctgagtagcttagtcaccattattggttcgtttattatgatgttgctgatctctccagtgctcgttttgatttttgtagtgacagtgcctgcctcggttctattgactcgttatttaatgaagaaatttcagccattatttcggcgtcgttcgcgaaagctaggggaattgaacggatttgtagaagaaattctttcgggtcagcaaacgattaagatctataaccaagaagaaccgatcattgaacgatttgatgaaaaaaatcaggccgcagtttcctcttattacaatgcagaatattatggcagcatgacgggaccgtccatcaactttatcaacaatgtttcgttgtcactgatcagtgtctttggcgcactgctatttttattcggtcgtctctctttaggaagcgtctcctccttcgtgttgtactctcgtaaattttctggaccgatcaatgagctggccaatatctttagcgatttgcaatccgcgttggcagcagcagaacggatctttcgcttgttggatgaagaaccggaagtctccgatgttcctgatgcctatgagtttacagaagtaaccgggcgtatccaattggatcatgtctcctttgggtatcaaaaggatcgcatgatcattaaggacctatcgctggacgttgccccaggcagtttagtcgctatcgttggtccaaccggggcaggtaagaccacgatcgtgaatctcttaatgcgtttttatgatccggatcaaggagtgattcgtttagatggacaggacatcaaaaaagcgacgcgcagcagcttgcgcaaaagctatgcgatggtgctgcaggatacttggttatttactggaactgtctttgaaaacctggcttacggtaaagcatccgcgactcttgctgaggtagaggcagcggctaaagcagcccatgtccatgagttcattcaacaattgccaaaagggtatgacacactgatcacagaagatggtggcgggatttcgcaaggacaaaagcagcttttgaccattgctcgtgcgatgcttttggatgcggatctcttgattttagatgaagccacatcaaatgtcgatacccagaccgaggggttgatccaaacggcaatgactgagctgatgaagggcaaaacgtcctttgtgatcgctcatcgtctctccactatccgtcacgcagatgtgattttagtggtccaaaacggtaatatcgtcgaacaagggactcatgatgaattattagctagagcaggtgcgtatgcagccctttaccaagcacagtttgatgaataagcaacgaatagcttgactcagaagaagcagcttagcagttggactaaagacccacgcatagtagcagaattggggcatccaacagatagttgcgtctatgtgcgccgaaaacttgctgaatcgcagaagtacacaatgacacggttcgcagtttgtagcaggccttttgtcgccgcctcttctttttcaatcaagcagtgacaaaattatgcagcgtttccatgacaaaccgcttttttatcggtatacttagaaaggaaacattctgaattattgaaagaaagaagggaacctgtgtgtttcataaacaattaaaagatttccccaaagatttcttatggggctctgcgtctgcagcgtaccaagtcgaaggggcttggcaagaagatgggaaaggcgcctctgtatgggatgattttgtgcgcattcctggaaaaacatttaaaggaaccaacggtgatgtcgcagtcgatcactatcatcgattcaaagaagatgtggcattgatgaaagaacaagggctgaaaacctaccgcttttctgttgcttggacacgaatttttccagaaggccgaggagaagtcaatcaagcgggactagatttctacttggctttgatcgatgaactgcttgctgcagggatcgaaccaatggttacgctctatcattgggacttgcctaaagcgttacaagaagcttacggtggttgggaatctcgccaaatcattgaagattttactaattatgctgcgacacttttcgaagcatttcgcggcaaagtcaaatactgggtcagtctgaatgaacaaaatgtgtttacctcactaggctatttattagctgctcatccgccaggtgtcactgatcctaaacgaatgtatgaagtgaatcatattgccaacttagctaatgcttctgtaatcaatacatttcatgagatggagattccgggtaaaatcggacctagctttgcttacacaccaaactatccgatcaacagtgatcccaaaaatattttggcagcagaaaatgccgaagatttgatggcacattattggatggatgtctacctatggggcgaatatccgatcgcagccatgaatttcttgaaagaacaggggatcgcgccaacgattgagccaggagacatggaactgttgcgttcggcaaaaccggatttcttagggatcaattactatcaaaccgccactaacgcagcaaatccgttagatggtgtaggcgctggtaaaatgaatacaactggagaaaaaggcagttcagaagaaacaggaacacccggtatgttcaaaaaagtcgaaaatccatttgttgatcgcaccaattgggattgggaaattgatcctcaagggttgcgagtggcgttacgccgtatcaccagccgctatcggatcccggtgatgatcactgaaaatggacttggcgaatatgacaagttgacagacaatcatcagattcatgatcaataccgcatcgattatctgtcaagccatgttcacgcaatcaaagaagcaatcagtgatggtgcagaggtgctaggttactgtacttggtcgtttactgatttattaagctggttgaatggctaccaaaaacgttatggtttcgtttatatcgatcaagacgaaaatcaagacggtagtttgacccgttataaaaaagacagcttctattggtatcaagaagtgatcaagaccaatggacaaaatagttaaatcatagcaaaacaaaaagtacgtttctaaaaggaagcgtactttttttgtagaatgaaaatcgttgacaaatgtaaacgatggaggtaaagtagaagagtagagattacagttgtaatcaaaaggtagcctctctcgcttatttggggaacccagtacgatatttcattaaggaggaataaacaatggctgaagggaactatgcaatcgaaggaatgacctgtgcctcttgtgcccagacggtcgagaaggctgtcagcaaagtcacaggtatcgaagaagcctccgtcaatttggcaacggaaaaacttcacgttcgctacgatgaaacgcaggtagatgaacaactcttagcaaaaacagtagccgatgccggctactctcttataggaaatcagctgcaagcaacattccagattgaaggaatgacctgtgcttcttgtgcccagacggttgaaaaagccgtgaacaaacttgcaggcgttcaagcggctactgtcaatttagccacagaaaaattgacagttcattatgacaaggagcaactaaacacggctgccatcgaagcagcggtgacgaaagcaggctatcaagctttcaccgaaaaaactgttgagatgcaatcggcaaagaaagaccccattcaaaagttatggcaacgattttggttgtctgccatttttaccgtgccattattttatttagcaatgggcgaaatgatcggtctgccgctcccttcctttttgaaccctatgacacagcctgtagcatttgttagtacacaattgatccttgtgcttcctgtcatgatctttggccacgctttttttagcaatggcttcaaagcattgttcaaagggcatcctaatatggactctctggttgctttaggcaccagtgcggcttttttatatagtttgtatggaacggtcatggtttatttaggagagacgcatttcgcgatgcatttatactatgagtcggctgcagtgatcctaacattaatcacactagggaaataccttgaatcggtatcaaaaggcaagacctctgaagccatcaagaaattattggatttagcaccaaaaactgctcggatcttaaaaaatgattcagagatcgaagtgccagtcgagcaagtcgtggctggcgatattgtgattgttcgtcccggtgaaaaaattcctgtggacggacaactgatagtaggacattcagcagtggatgagtcaatgatcactggagagagccttccggtggagaaacaacctggtgattcagttgttggagcgagtatcaataaaacgggtacgtttcgctatcaggcgacaaaagttggcaaggataccactttagcacagatcatccagctagtggaagatgcccaaggttcgaaagccccaattgcacgattagctgacaaagtttcgggtgtttttgttccgatcgtgattggcttagcgttactagcaggactggcatggtttttcttcggacaagagtcgtggatctttgcactgacgatcactatttcggtattagtcattgcctgcccctgtgccttaggattagcaacaccaacggcaatcatggtgggaactgggaaaggcgccgagaatggtgtattgatcaaaagcggtgatgcattagaaacgactcgcaacatcacaacgatcgtttttgacaaaaccgggacgatcacagaagggaaaccagttgtgacagatcttttaccttatggcgaacatacgaaagaaacggtcttgcagctagcagcttctgcagaagatggatcggagcatccactgggagaagctatcgtagccgctgccaaacaacagaaattaacattttcttcagttagtcatttccaagccgtccctggtcatggaatcacgggaagattggatggaaaagacgtgctgttaggaaacaaaaagttgatggatcaaaaacaaatagatgtctcatctgtaattgcttctgccgaaggcttagcaaaacaagggaaaacaccaatgtatgttgccatggacggcgcattgattgggttgattgctgtggccgatacggtgaaaacaagcagcgcacaagccattgaacgtctgcatcaaatgggcatcaaagtggcgatgatcacaggagataatgcgcgaacagcacaagccattgctgatcaagtagggatcgatgaagtcattagtgatgtgttgccagaagataaggcggctaaagtggcagaactgcagcaaactggacaaaaagttgccatggtaggtgatggaatcaatgatgcaccagctttagccaaagcagacgtcggtatcgccattggctcaggaacggatgtcgccattgaatctgcagatatcgtgttgatgcgtagtgacttgatggatgtgccgactgcagtggaattgagtcgagcaaccatcaagaatatcaaagaaaatcttttctgggcatttgcttataatgttttggggattcctgttgctatggggttattgcatctttttggcggaccgcttttgaatccgatgattgcaggggcagccatgagttttagttctgtttccgtcttattgaatgcgctacgtttaaaacggttcactccagtcagtaaacgagcagcaagaaactaataataaaatagagaagaaagaaggatcattatgaaaaaaacatatcaagtcgagggcatgaaatgcgaaggctgtgcaaaaacggtacgagaaacacttgctcgagttgccggcgttaccgaagttacagttaatttgaacaagaaaactgcgaccgtcataagcgatgccccagagcaagcattgacagctgcgttaaaagacacttcttatcgtttactttctatctgatgaacgtcgagaagagagatataaaaacaatagaccaataaataaaaacagtcaaagcgagcagtaagcaagactaatacacccaaaaaccgaaaaatctcctttctatcttttggttgttcttttgtctagttttactgcgccgctttggctgtttattaccgttgaacgtctaaataggaatatacccgcgtatcataacggttgcgactgcgggagtattcgatcggtgagccatttttttggtaaacgatttgttgaatttctaatactggatcggttggatcgcaagccagatatttctgatcatataacgagcttttatccgcagaaatcgtccgataagcaccgacaaattgaatgcctagttcttcttttacatactgatagatagaagtttccaagtgagaacgttttagattaggaactaaatggaccggcatgtacgtatgctctagaataaatggtctgccttctaaaattcgcagacggataatcttatagacaggttgttcttctgtcaacatcagtttttcttgaatctctttgtccgggaaagctacttgaaaatcaatgacttcactggtcaattgccgctttgctttgcgcatttcagtggataagccgacatattccgttaatgtagtcgtatctcgatccacaaaaggatgattcaatattttagttccagctcctcgctgagaatagacgagcccttccatagagagaatcccgatcgcctttttgatggtcatacggcttacttgaaactcttcaacgagatctatttggttaggtaataaactatctggaggataggttttattcttgattctggttcttaaaatattggcaatttcttgatattttggcatctcctcacctcgcaaagagtatagctgaaaaaagcgatttcgacaatccgaatcggcagccttttttcaaaataaaagactgacaggttgatgggcctgccagtctttttgtcttaactgattgaagcttcttgttgacgatccagaatacgcaagaatggataccagatcataccgacaagtaccacgtcaatgacttgcagcaagccccctaaccaagaattggttgctaatacaccgctagcaatcactggcacggtccaaggcacagacacaccagttggtgctggaactagcccagcagccatcaccaagtaattgaaggttgttacaactaagggtgcgactacccaaggaatcaaaatcgtcgcattcaacacgatcggcattccaaaaatagcaggttcattgacattgaagataccaggagcaagagccaagcggccaacatcacggtattgctttttcttaaggacaaaagccatcaaaatcacaacagctagtgtcattccagaaccccctaaaccaaccgtgaaagtttccatgaatggtttcgtcacgatatggggtaatgcttcgccattttgataggcttctaaattatccaacatcaatgtgttccagataggatccatgacagagttgacaatgatttgcccatgaagaccaaagaaccataagaactgaaccaagaacagtgccaatagtgtagcaggtaagctgctgccaagacctgttaacggtttttgaatcaattcatagattacatcatgaaggttcgcatggaagacgccggtcatgatcgcattgatcatcaaaaagatggttagcgtaacgatcgctggaatcaaagcagcaaatgacttcgttactgcaggtggcaccccatcaggcattttgatttgccaaccgcgttttgtgacgcgacaataaatctcagcagctaagaaggcagcgatcattccgataaacatccctttggcgcctaatcggtcaagggaaagcacgccagttactgtttcgcctgattctgtagtcatgaaaaatggcgttagaatcaaaaagcttgcaaaagatacagcgccaccaaaaatcccttcaacatcataagacttagacaaataatagccgataccgaaagtaacaaaaactgtcatgatgctcattgttgcattttgtccattaccgaacagggtacttagagtgcctttcgttgcatcattgaaaaaaggcagattgttgataaccactacgattgaaccaaacatcgtaatgggaaaagaaagcatgaacgcatctcgtaatacagtgaggtagcggttttgccctaacgcattggctagcggcaagattttttcagatattttatccataaaaccgttcattaaaaatcactcctaacaactttttgcaatcgattacaattcataatgtatcatgttttattttaaatgtctatacattgtctaataaaaagattgatttttggtagtgcttcctttatgattacggtatcaagcatgaataaggagtgtaaaaaagatgacgtatcaatttccagaaggattctggtggggttctgctgccagcggtcctcagacagaaggaacttttccaggagacaaaaaaggacccagtatttgggattactggtatgagcaagaaccaggaaaattctttgaccgtgtaggccccgaaaaaacatcccaagtctataagcggtataaagaagatattcaactgatgaaagaaacaggacacaatacatttcggacatcgatccagtggagtcgcttgattccagcaggaactggcgaagttaatcaagaagctgtggctttttatcatgattatttcgatgaattgattgcaaatgggattgaacctttcgtcaacttgtatcattttgatatgccgatggccttgcaggaaaaaggcggttggttaagtcgtgagacagttgaggcttacgtcgtttttgccaaaacttgttttgaattgtttggtacaaaagtcaaaaagtggttcacgcataatgaaccaatcgttccgatagaaggtggctatctctatcagttccactatccaaacgaaatcaacatgaagcatgctgttcaagccggcttccatgaaaccttagcgagcgcgaaagcaatcaaggaatatcatgcgctagaattgggtggagagatagggattatcttgaatctgacacctagctatccgagagatgaagcaaacccggaggatgttaaagcagcccaaatcgccgatgccttcttcaaccgttcttttctggatccagcagttaaagggacatttcctgaagaattagtcacgatcatcaaagaattagacatgataccggaacatgaagcagaagatttagtgatcatccaagaaaatacgattgacttattaggcatcaattactatcagccacgtcgtattatggcaaaagaaacaccgatcgaccacacgaatggcccattaccagatgattattttgacaattatgataaacctgacaaaaaaatgaacccttatcgtggatgggaaatctatgaaaaagggatttatgatattttgaccaatacccgcgagaattatggcaatatcaaatgctatatttctgaaaatggtatgggcgtagaaggagaagaacgttttgtcaatgatgaaggaatcattgaggacgattatcgcatcgaattcgtcaaggaacatttgaaatatgtccaccaagcaatccaagaggggaccaattgtgttggctaccatatgtggacatgtatggataactggtcctggacgaatgcctacaagaatcgttatggcttcatttctgttgacttgaataatgatgccaagcgcactattaaaaaatctggccgttggtacaaagaagtttctgacaataacggcttttgattcaaaacacagtgaagattgcttcactgtgttttttttattgtcaaaaaatggtgctgtctatagcaaaagaataggactgtataatccatgctcagttttataaataaaaagactagacttataaatgtaagcgtggtttcctatagaggaaatcggtttcactaaattataggatggtttttgaaaggagaaaaaaatgaataagtttatcgcgtttatggagaagcattttattcctattgcttccaaaatcggttcacaacgtcatctagttgcgattcgtgacggttttatcgtaacgatgccattgatgatcttgggatcttttggggtattgatcaataatttgcctattccagcttatattgattttatgaacggtatttttggtgaaggcacctggcaagcatttggcaataatttatctgcaggtacattttctattttagctttattgattgcattcacagtttcttataacttggccaagagctatgaccaagatgcattaggagcaggagcaatttcagttgccagcttttttgcattaggtgcaatggccacagatgctgatggtttgctgacagctgcgggtcttggttcacaaggattatttttggcattgatcgttgctattatttctactgagatcttccgtcgtttggcaggcaatcctcgtctagtgatcaacatgcctgatggtgtaccacctgcagtttctcgttcttttgcagcgttgttcccagcaatgatcactgtttcgatctttgcattgttcacagcaatcttccaagcattcggcgtatcaagtttggttctatctttctatgagcttgtgcaacaaccattcatgggattggcaaactcttatccagctgcattgctactagggttcatttctgctttcctttggttctttggtttgcatggtgcaaatatcatcgatccatttatgcaaacgattaacattccagctatcgaagcgaatacgaaagcgcttgaagcaggagacaaattgccgtatattgtaaataagccgttttttgattcatttgttaatataggtggtaccggtgcaacattaggcttattgatcgcaattttcttggttgctcgtcatcataaagcctatatgactgtagcgaaattatcattggctccaggggtatttatgatcaatgaaccagtgatgtttggattgccagtcgtgttgaatccaattttgttcatcccttatgttttgacaccacttgtattagtttcaactgcatattttgccacagcaacaggactggtaccagcatgtaccgttattgcgccttggacaacaccaccgatcattggtgggatcttgtcaacacaaagcattgctggcggaatcttagctgcagttaatttgattatctcgatcgtgatctatcttccattcgtgaagatggcacagatccaagaaaatcgtcgtctgaaagaaatctaaccgatcaaaattaggctgggacataagtcagaacaagacgaaactacccgaacgaatgaaaatgacaatcctgttgctttagttgctagttggtggctaaagcaacaggatgggtagtcgtctttgttgcttatgccgcagtcttttttaattaataggatgtgaggtgaatgttgtgccaaagtatgttgagatagcagatgtccttcgaaaaagaatcaaagatggaacttatcccaaagagagctttctgccgcatcaaacggagttagtaaaagaatttggtgtcagtcggatgaccattaagaatgccatcaatattttgatcatggagggactgttgctttcgaaacgaggatctgggacgaaagtgttgaaccattctttttgggatcgtgacacgtcttctgtaaacgaatacaaaggacttagttaccagatgaaaatgcaaaaaagagatttacaaagtcaggtaattaccttcgaagtctgtttcccagatagcagagtacaagagatgttgaaagtcgctgcggaagagccggtgtatcatgtgattcgtttgcgaatattagatgggcaaccttatattttggaacattcgtttatgccagtagatttagtgacgggattaacgaaagaaatcttgcatcgatcggtatatgattatttgttagaagagttgaattataagtttgccggtgcttatcgaacatttcaagcagcgaaaagtgatgagtatgatcgtcaatatttgaagtgtcaatcggatgatccagttttggaattagagcagattatttatttagaatcgggaagaccgatcgattattcaagaagccgaaatcggtatgatgttcgcgggtattccatgttagacatgaaaccagatcttttaaatcatcgaaaaccataacgaccaaagtgctcgctgctttggtttttttgtttttgatggccgaatggtttgttttcgtatagattctgagaatcaggtatactaatagtacgaagatagatacaagcagttttcaatgattgcttaaggagtgaagaaaagtatgaacctgctgtttgcgattgacgatacgtttgtagaacaattaaaaacaaccctctattcaatttggttgcacacatcggcaagccgattggatgcatttgttttacaagagaaggaacttgctcagacagagaaattgaatcaattttgtcatggactgggaattgtctaccatccagtcattatcggtacaggatctatttttaaacaagcccctgtcagtgatcgttatccagagtcgatctattaccggttattggcccaaaattatttgccgaaagatctagataaggtcttatatttagacgcagacatattgtgtatcaacgatttgcagccgctatatgaattaccgcttgaagatcatctttatgcggcagcaaaccattcaaaattaacagaggttacgacagtcatcaataaagtgcgtctcaaaaattatgagtctgaaggatatttcaattcgggcgttttgctgatgaatctgactcagttacgtcaagaagtaaaagaaaaagagattgcggcatttattcagaagaatcaattgaatttatttttaccggatcaagatattctaaatgggctgtatggggatcggatcttgggaattccagaccaactatataattatgatgtaagaaaaaaccgtacatatgaaacgatcagcctaggacactgggacttagactgggtcatcgatcatactgtattgctgcatttttgtggtaaagacaagccttggaagaaagggtacaagagccgttatggttcgctttataaatatgttgcccaacaacaaagcaagtatagcaggtcgttatcagacaactagagctgaaatcgaccaacgatctctttgagacgagcattacttttttgaaatgaaggtaggaatgataccataatattagaaactaaggcaaaagcagcaaaccgttgctagattcatttaaccgagtagcggaagaaaagtggagaacgaaagggagcgatagaaatgaaatttttgctttggcttgtttgtgtggtaggaatcgagattactgggattatttccagcttgttcgcgggtgatattgctgcgacgtatgcccaaatggacaaaccgtttttggcacctccaggagggattattggtatcgtttggacgattttatatgcctttatggggacagctttgtttttactcatcattgcgaaagtaaatccagcatttaagaaacaagcctatatcttctttggtatccagcaagtgttgaactttttgtggagtattgtcttttttggctggaatctttattgggtaggaacagtggttatcgtcttattggttttgacagtcatcgtctgtatgtttttatttgcccgaatcgataaaagatccacctatctttttgtaccttatctgatttggtgtctctatgcggggtatttaactatcggattaacactattaaatagttgatagtaacaaaaaacaagcgcagatttctgcgcttgttttttgttataaatattcttctgtcaactccatgaaggtatcgatatcttgtaagacccgatcgattccggcttgccagaaatcaggttttgtcagatcaacgcctaaatgtttttgggccaattcttccgtcggcatagaagctgtgtcttgtaacaaagcaatatattcttcttcaaaactcgtccctttttggttggcataagcatagattcccatgctgaaaagatagccaaatgtgtaaggaaagttatagaaaggaacatcatcaataaagaaatgtagttttgccgcccagaaatgtgggtgatagctagctaatccatcggcgtaactttctttttgtgcagccaccatcatttctgtgatttgttcagcagaaaccagccctttttgccgtgcttggtaaaaactgttttcaaaaataaagcgggcatggatattcatgaacatggcaatggcattttgcattttggcatctaacaaattgattttttcttcttttgtttttgcttctttcaatgttgcatcagcaacgattagttcggcaaaggtacttgcagtttcagccacattcatcgcataatcctgattaagctgcggcaagtcccaaagaacactactatggaaagcatgacctaactcatgcgccaaagtggctacctcattgacggaattactataagtcatgaaaatacgtgattctcttgtttcaggcagacttgtacaataaccgccaggacgtttgccaggacgatcttctgcttcgatccaacttttttcaaaggcttcttgcgcaaaatcagccattttgggactgaattttttaaagttttctaaaatgaaagcagctgcttcatcgaatgtataggtacgttccttcatttcacctaaaatgatcggagcatcttgatcctgccactccattttttcttttccgaataattgggcttttcgtgtcaaaaagtccacgatcggttgtttgttcttctggatcgttccccacattgcgtctaatgtcgctttttgcaggcgattatactcgagaggctccttcagatagtcatctacaccgtgcagtttgtaattggagagacggaatccatccagatgattcaatgtatcggcaaataaatcttctttttctccccaagctttttcccactccgcaaatagttgagcacgaacttcaggatctgggtcacccatcattttgttgaaagcttgaccagctgaaagagtaatcgttgttccatccgaccgggtaaatggaatcgcaatcgaagcaacaatcgtatcataatgctgactccaagcatttagtccgtctaaagaaagtgtgttaataatcgtttcttctgcttccgacaaaagctccttgccgtcgcgacgaatttcgctcaaacgaaaggcgatagtcgcaaagggttcttctttcaatagtgtctcccagtcttcatcagaaatttctgtcaattttttcgaaaaaactgtttcggctgcttgtagcattggtaatttggcatagagatcgcccgaaagtaattttgcctgattgtcattaacgttggcagatagcaatgcattgataaagctgctgcactgagaaaatcctttactgattgtttcggacaatgataataattcagctaattcctctggttgagaggcattgtcgggttgccacgcatctacttttgtgcgataagttttgatttgtgcatctagttgggacattcgttcttgcagttgggtagacgtgctgccgcctgaaaaaatcgaatcaaggtcccagttgagagaataagtcatcttgggtgttgctcctttcgtttatcagatggtaataagtatagcacacccttcgaaaagtagttgcagagaatactgaaaatggtaagattagaaaatgaggggctgagatgatgaaaaaaatgtggaaagaaccaaatttttatttcacgattgcggtagctgtgatggtgattttatttattagttcgtcacaaacttatgaacaacaatcacaagtcggtttgctttctcgcctgttaaaagaagagccattgaaagaatggttgagcaaattcgctttctcttatgcaggatctgaaatcagtattgccgaaaaaggttatttttcttttgtggaattttttattcgtaaaggggctcatttctttacttactttgtattaggaggtagcttatttctatcattgagctatcgaaaaattccctattggctgtcagctttctttggctggttggcagcaacagggtatgcagggatggatgagtaccatcaaatgttgaccggtggccgtacacctttgttccaagatgtcatgctcgattcagctggagcactgacagctgtcttacttagttgggggattcttagttggcaaaagcgaggcaagaaaagaaaataagattattttttaacagcaaccataactaaaatgcaatcaatcagctagaaatagtaaagtaaagatagaggcggaaaagatgcaagcagatcacagcagtaaaataaatgatccgaatagacgacaaccggatatcgtggtgcatgaaagtctaccagtaggagttgccttagcaatggcagggggattcttagacgcatatacttatctctttcatggagaagtgtttgccagtatgcaatcaggaaatgtcattttgttaggaatcaatttggcatctggagagtttggacaggctgccagatatttaccgccaattttgctgtttttgatagggatcatagtgactaatggcttgcagcatcgtttcccaacaggtggtagaattgtttggcaaaatgtagccctcttctttgaagcacttggtatttttcttttaggattttttgctcagacattgccaaatgtctttgtggattctggactttctttttttgcagccatccaatatgcttcttatcgcagattagctggaatgccctatgcaacgacgatgacgaccggaaatttgcgttcaatggcggattatctttatcagcgtttcttcaaaaaagatgctactgtagattataagatcaagtatatcgcgatgatcatcggaggatttttcttcggggcagtcagcagcagtttattaggtatgtttctttttcaccgaacgatttgggtcgtatcgggcatattactttttgtactgacgattacgatcagaaaccagaatcgggtataaaaaaggacggagaaataattctccgtcctttttggattatatagattaaataacgataacaggcgttcctacttctaccataccaaataattctttcatcacacctggcggagtattgacacatccgtgagacccgcgggtcttccataaatcaccaccatattctggttgccaatctgaatcatgaatcccaacgccagtccaatcaataggcatccagtagtcaacaggagaagaataatcttcgccggtcaatgtagcattccgctctttgttccaaacgtaaaatacacctgtaggagtgggtgatttaggttttccagaaatgatgtctgtttcaagagcgactgcaccgtctttgtaataccacatatgttgattttttaaatcaacttcgatataagtgtttccaaacagtggaccacttggatctgcactacccaagaccactggagaacgagtaaagtcttctccagtctttaaggcttcgatcaatgcacttgtttcagaatcagtttggatcgtccaacttagtgtcccagctggtacggatacctcgccttgtttcgtgcttttgaacgtagaagcattggtgcttgtgttgtattggttccctaaatctgctacataattccgtactttttcttcatcaatcgtggtttttccatctttataagagagccaatccatgattgttgcggtcggaatctggaaagttgagccattgatggaataattagcatttacttgagcaattttattcaatgattccatttcttttgctagttctttgtcatcagaagtaacgctaggtttcttttgatacgcagtcaaatccaattcactttcgccgctagtaattgctttttgtaattccgtgacagtttgttcgacgtcaatggcatcaccaacaacttctggctcaatcgagaatccatcatctccttttttcaatgtggcatctttagaagcggtccgaccttcatttaaggtttctaaagcctctttgattgtggctgtttcacttgtcaacttttgttgatcaacagaaacggtacctagttttttatcttctgcagcagatacataggccattccccatgtccactggttttgttcatctttcaaatcttccaattcttttgtaaaatccgtttgcaaaccaaattgagccaaattgatggttttccaatccgtattgccttctttgattgtaaaagactgtttgctgtaacggtcatgcaacaaatcattggcttcagcgaccgttttattgctgatgtcaatatcatcgatcgaggtatttggcaagaaacggtcttgataatatgtacttcgataagcgtatccgcccgcaatcacgactagaacggcagcgatagcgatcagaacgatctttttcgtcttactctgagtatgtgtgtgtttgttggatcgtgtcatttaaaggctccttttatgatgatttaaaaatgatagatcggctaaatcataccatattctacaagaaaagcgaattgattaagtgaaagttccatgaaaaaatagagaattcttaaattataaaaagagtctgctcataggacagcaaccaagaagtgattcaacgaaagctgctgtgtgataaaagcacagcagctttacgcaatattctttggatcaaagtacacgaagcatcttgattcaaaggatctctttcttgttcggtcttatgttacagactcttgtaagtggcttatagcaatcgttttattgattgtcttccgcatctagtttcgcaaaagcttcatctagaatgtctttcaattgttttgcagaagcagtcattcgatcttgttctccatccgtcaatggaatttcgattactttttggattccttgggcattaatgatagcaggggcaccgatataaatatcttttaagccgtattcgccattcataaagacagaaagcggcagtactgcattttcatcatccaaaatggcacgagtaatacgagccaaggcaacagcgataccatagaaagtagcaccttttttctcaatgattgtgtaagctgcatcacgaacactgaagaacaagttaaccattgcttcttcatcaatatcggggttgtttttgacccattcataaatttgcaatccggcaacatttgcatgagaccaaactgggaattctgaatcgccatgttcccctaaaatataagcatggacattacgtgcatcaacatcgatcaactcagctaatgcttgacggaaacgagcagaatctagtgaagttcctgaaccgattacgcgctcttttggaaaacctgagaatttccatgttgagtaggtaagaatatctactggatttgcagcgacaaggaagataccgttaaatcctgaatcaacgatttgtgtaactacttcacgattgatttttaagtttttgtggactagatccaagcgagtttcgccaggtttttgtggcgcaccagctgtgatcaccacgacatcggcgtcatgtgcatctgcataagtggcagcatagatttttttgggtgaggtaaatgctaacgcatgagataagtcgatagcatctccttctgtttttgctgtatttatatcaatgatccctacttcttgagcaatattttgagtgactaacgcaaatgcataactggaaccaaccgcaccgtctccaacaaggattatcttttggtgatcttttttatttgtcttagcagtcatttgtgtatcattccttccgcatatttgttttactaggtaacatcctaacactttcaagcgattttgtcatgtgatttgctcaacaatgttacagataattttgctgtttcatttgtaaatgctttctttgttatcctgtaggaattaggataaatcagggtttctaatgatttttttaagaaagagaaattctgagcaaaggaaagacacggtaacagtccgttatgtgttataatcgtagtgaacgtttttactgggcagaattgtcgtgcccagtattttgtggtggtaatttttttgaaaaaatggagcggatcaaaaaatgaaaatgattataggtctgggaaatccaggcaaaaaatacgaaaaaacaaaacacaatgttgggtttatggtagtcgatgcgttagcggagaaataccaagctacttttaaatcatcagcttttgaagcagaaattgctgaattttttatgaacggtgaaaaaatcatgttggtcaaacctcagactttcatgaatgaatcgggccgggcagtagggcctttaatgacttattatggagtttatcctgaagagatcgtggttatctatgatgatcttgatttagcgttaggcaaaattcgtttgcggcaaaaaggcagtgcgggggggcataacgggatgaaaagcttgatttcccatcttggtacatctgtatttgatcgcatcaaagtagggatcgatcgaccacagccaggccggacagtggtcgatcacgttctaagtccttttgctaaagaagaccagccgatgattctgcaaagcttggataaagcagcagcagcaagtatcgattacttgaccaccggtgattttcttgccacaatgaatcgatttaattaaggaggacctgtatggatctgattgaactaataaataaggtgccgcaagtcgctgcctggcaccaacaattaacggatcacgcatctcgacagctattgactggcttagcaggttccgcaaaaacattagcttttgccggagcttatcagaaatttgatcggcaagtcattgttgttacaccaaatctttattataccaatcaagttgccgaagatttgcggaatattattgacgacgtgtatgtctttccggtggatgaagtgttgtcggccgaaatggcgtttgcttcaccagaagctcgagcggagcgagtgacagcattgaatgctgtcgctaccgggaaaaaaggaatttacgtcatgccgatcgctgcattgcggaaatatctgcctgctaaagatacttggctgaactaccaattttcttggcatgtgggggatgagatcaatttagatcagttgccgcagcaattggtattgatggggtatgagcggcaatcaatgattggcaaacctggtgaatttagtattcgtggaagcattttggatatttatcctttgaaagctgaatatccggtgcggatcgagcttttcgatgtggagatcgactcgatgcgctcttttgacgtggaaacacagcgttcagtagaaacgttgtcagaagtaacgattgttcccacaacagaattagtgttttcgccagctgatttagctcatggacaaaaagttctgcaagagttgctgaagaaacggctcgctgtagtgaaagagaccacagataaaaactttttagaagattattttggtcaattagcatcggcttggcaaagtggcatacctgacgagaatgctcgttattatgcggatcttttgtatcagcaaccgacgagcattttggattatttttcaaaagatgcactgctgatgatcgatgattatgctcgtattatggagacaaaccgcgagattgaacgagaagaagctgagtggcatacacaaaaaattgcagaacttcgcgttttttctgagcaatctttcgggcaagatgtccagcagctgattcaaaaagaacaattttctacaagtttcttctcgctttttcaaaaggggatgggaaatcttcgttttcaagcgatccacaattttcaatatcgaccaatgcaacaatttttcagccaaatgggtttgctgaaagttgaagtagatcgctgggagaaacaacaacaaacggttgtctttttagtaagtgattcagaacgagcaaaaaaattggaacaagattttcgtgatcactccatttacgcagtacaaaccacagcagatcgactttttacaggtcgaacgcaaatcgttgtagaaacactgcaaagcgggtttgaaatgccccaagataagttggtcattgtcacagaaaaggaaatcttccaaaaaatcaacaagaaacgtacgcggcgtcaaaatgtgaccaatgcggagcgattgaagagttacaatgaattaaaagccggcgactatgtcgtccatgcgaatcacgggattggtaaatacattggtatggaaacgctggaagtagatggtgtacaccaagactatatgaccatcctctaccaaaatgatgataagctgtttattccagttacccagttgaatctgattcaaaaatatgttgcctctgaatctaaaacgccaaagatcaataaattaggcggcagtgagtgggcgaaaacgaaacgaaaagtttcagcaaaaatcgaggacattgcagatgatctcattcttttatacgcaaaacgcgaatcggagaaaggttacgcgtttcagcctgatgatggctatcaaaaagaatttgaagatgcctttccttactctgagacagatgatcaattacgcagcactgcggagatcaaacgtgatatggaaaaagaaaaaccaatggatcgcttattagtcggagacgttggctttgggaagacagaagtggcattgcgggcggctttcaaggccatcaaagagagtaagcaagtagcctttctggtgccgacaacgattttagcacaacagcattatgaaacaatgctggatcgctttgaagggtttccagtcaatgtcggtttgttaagccgttttcgaacgaagaaacagcaaacggaaacgatcgagcaagtgaaaaagggccaaattgatattttagttggcacgcatcgcctgctgtctaaagatgtagagtttgcagatctgggattattggtgatcgatgaggaacagcgttttggcgtcaaacacaaagagcgcttgaaacaattacgctcgcaagtcgatgttcttacattgacggctaccccgattccccggacactgcatatgtccatgttgggggtgcgggatctttctgtgattgaaacgccaccggaaaatcgctatcctattcaaacttatgtgatggaaatgaatccaggtgcagttcgagaagctattttgcgggagatggcacggggaggacaagttttttatctctataatcgagtagatacgattgaacgtaaagtcgaagagctccaagcgttagttccagatgcgcgtattgggtatgcccatgggcagatgacagaaatccagctagaaaacacattgtttgattttatcgaaggacaatacgatgtgttggtgacaaccacgatcatcgaaactggggtcgacattccgaacgccaatacattatttgtagaaaatgcggattacatgggcttgtctactctttatcaattgcgaggtcgtgtcggtcgaagcaatcgtgttgcgtatgcttattttatgtacgaacagcaaaaaattttgaacgaagtcagtgaaaagcggctccaggcaatcaaagactttacggaattaggttccggatttaaaatcgcgatgcgtgatctttcgattcgaggtgcaggaaatctcttgggggcgcaacagcacggatttattgatgctgttgggtttgatatgtactctcaaatgctgtcagaatccgtagcgcgtaaacaagggaaaaatacacaagcggagaaaacaacggttgagatcgatcttggcatcgatgcgtatctgccaacttcttatatagaagatgaacggcaaaaaattgaaatttataaacgcatccgtgaattggattctcaagaagcggtggatgagctgcaggatgatctgcttgatcgctttggagaatatccggtcgaagtggctcacctattaactgtcggagaaatcaaaatgaatggggatcgggcattgttagatacgatccgtaaacagcagcaaacagtgatcctaacgttaagtaaagttggcaccaaaaactattctgtcgaacagctgtttgaagcgttgaaagcgaccaagcttaaagcgacgatgggtgtcgatcacgagcagatgacgatcaaacttcagattcctgctgtgatgaaagaaagcacttggctgttagagattcaagattttgtcaaagcgctacgggaacaaaaatacgtgttacaagaaaattagttataaaggggcggagaagatgccaaagtcacaattaaaacggacgatggaaggagcatttattttaacgattgcttctttcattgccaaagtgttaagtgcggtttgccgcgtccctttccaaaacttagttggtgacgaagggttttacgtctatcagcaagtctatccaatctatggattagctatgacattggctttatctgggttgccgcaatttatttcgcgcgtgatcgccgaacaacctgatcctcagaagcagcgtgcccagatccaagtcatctatccgtatgttttttggacagcgattggactatgggcaacgacgtttttctttgccgatgttatcgctcgggtcatgggagacgcaggactggcatctttgatccgcgtggtatcctttacattcctctttgtaccacccctgactttttatcgtgggagtttccaaggaaatttacagatggtaccgacggcagtttcccaagtagtagaacagctccttcgagtcggagtgattttagtagcggccagtttttttcatctcttctcatgggatgtttatcagactgggactttggcaatgtccggcgcattgattggcggacttgcggcgtgggggattttaagctattatagtcggaaaatcaccggtcggtcgttagcgatccccacaaaaactatgcctaccgcacatgctccttccttgcgtcgccgttttttgattgaagggggactgttgaccatttacagcggttttttgattttgtttcagttggcagattcctttttgatgacgaactcacttgaagccagcggtttgacggaacaaagtgcccgcattgcaaaagggatctatgaccgaggacagccattggttcagttaggtctcgtggtagcgatggctctaagttcgactttcttgccaacattgacgaaatatctgacagtcaaaaatcagcacttgtttgaaaaatcagctaagatgtacttgcggttgactttagggattgccagtgcttctgcagttggcttggctatcctgcttccttatatcaacttcgctctttttaaagatggtgccggcaacagtgcgttggtcttatttgtttttgcggtcgctttgatggctgcaatccaagcgtatcaaagcatccaacaaagccggaaccaattccgtgtagggatttatgcagcaggatgcggccttttgcttaaaggtttgctgacgtggcccttgacctatcttttaggaacaactggtgcgagtttgagtacccttttaggtttgatcggtactttaatctattttgtgttttctgagaaaaaagcattgaacagcttttggatagagcaagggtatggcaaaaaactcctgctttgtttagggatcatggcttgcgcactgtttttatattatggtgtgatcactctgttgagtggaggtccagtgacgaaaagactgcaagcgctgattttttgccttggaggggtcttttttggcgggacagttttcattataatggctctcaaagttaaattattaacgattcgagaatggctgctcgttccgtttggaaaaaaattgttgaaattaagaggtggaaaaaatgagattagataaatttttaaaaatatcccggattatcaaacgtagatctgttgcaaaagaagtagcagataaagggcgtatccaaatcaatggaaaattggcaaaatccagcagtgatatcaaagtcggcgatacggtgcgtattcagtttggaaataaagtattagaaataaaagtacaagaattacacgaatcaactaaaaaagaagatgcagctaaaatgtacgagatcctcaaagaagaacgtatctcagaaaatgcttgatttttgtcccattttcagttagacaacttttgtggatgttggtataatggaaaaaacaatcacagtgacaggagcgaggtcagcatggataaagagccaaacaaacaaatagaactattgcagaccgagtatgccaaagagcaatttgccaagttcgaaaaagaacgacgacaagtggtctttcgtcgacgtcgacttgtagctgtttttgttgcagcgctagtgatttttgcaatcgtaggtattcaaatgttcaatgatcaaatgcgtctgcaaaaattacaagagtataaagcagaaacagtagcaaaacaagaagcagcggacaaaaaagtgacacaacttaagcgagatgtagcactgttgcaagatgacgaatacgttgcaaaattagctcgcagtagattcttttattcaaagaaaaatgaaaagatctaccctgtcttgccggatgcttctgattcaaaaacagaaacaagcggtgatgaggcaaatgctagtgatacaaagacaagtgattcggaataaacaaggtcatacctactcatcgcagtagttgaaatgattaaatgggtaaaaattaggaggaacattttttatatgtcaatcgaagttggagcgaaactaaagggcaaagtgtctggtattacaaattttggtgcgttcattgatcttggtgaggggaaaactggtttggtacatatcagtgaagtatcaaatgggtttgtgaaagacattcatgacgtgttgtctattggcgatgaagtaaccgttgttgtgacggcaatcggcaatgatggaaaaatcgggctatcgatccgtaaagcagaagcaaagccggaagaaaaacgtgattttcctaaaaaagaattcaatcggtcaagtccgaagaaatctttttcacgcaatcaaccgacgaacgtaaataaacaagacttcgattcattgatgagttcttttctaaaagatagtgatgatcgtttatcttcattacgacgtaatacggaaggtaaacgcggcggccgtggcggtcgacgtaactaaacaggatgagcaagttgtcaaaagaatttgtgacgtaacgataagtatttcaaaaaatatccgaactatatccgattactcctaccatgtagtaggctttcgccgtggagcacggcgttttggaatcggcatagttcggatatttctctttcttagcaatagacagtcatttttagtttgaagttaagtatagaagcaagagacacggagggatagaatgcttaagcaaaaagtctatcatgcaatcaaagccgatggatgggtagaggatgctacttgtttgcttgctgtttcgacaggcgtggattcaatggttttactccatgtgatcgaagagttgtttcagcaaggaacatttggcgtggctcatgtcaatcataatctgcgggaagcttcagacgacgaagcagcgttcctgaaggactattgtcaaacgcgcgggattccatattatgaacgagtttggcaagatccgccccaaaatggcatcgaagcggccgctagagagttccgctatcatttttttgcagaaacgatgactcttcagagttatgattggttattaaccgctcatcatgcagatgaccagatggaaacgatgctgatgaagatggtgcgagagggacgcttgcaaaacgcttcgggaatcaagcgcaagcaaccttttggtaacggttatttgatccgtcccttcctaacgatcgccaaagaggagattagagactatgcaagaaggagagggatcgcttatttcgaagatgaaacgaatcagcaaacgctgtttcaaagaaatcgcctgcgtcatcaagcggtccctctgctgaaagcagagaacccgagagctcttgatcattttcagcagctttctcaagagatgatctatgctgaccaattgatcaaaaagcagcaagcagattggctcgccacgatacttcatgaggaagctgaaggctattttttaaacttggatgaattggctgcgtttaccgcagcagaacgctattacttttttgaaggtttgctacagaaagtttcccatgataaaggaatctcgtacaatactaaacaacgagagcagttgctgtatctactagaacataatcccagtcagtggataatcgatttaaatcaagattggcagattgttcgagtttatgatcagttgaaagtcactgctgttaaaaaaggctctcacctccaaacgcaggtagatgagacgcattttgttctaaaaaaaggtgaaagtttctttttgtcggaccatgaatggatcggctacattccaagtgacgcccaagttccagaaaaagtcatggattggtcagagatttcacaaattttaccgatacaatatcctgcgacagtttttttgcggaagcgaaaaccaggggatcggttacagctgaaaccaggtcttacgaaaaaaatcaggcgtttctttatcgatgagaagatttcgaatgaaaagcgtgctgctagttgggtcctgacagacgctcaagagaatgtattggcacttttgccttatctattttcctatttgagtattgagcaagaaactgataaaatacactacatacttctttataaatatcggaagtaagagttggaaggagaactttatgttagacaaagatattgaaaaaattttgattactcgagaagagatccaaaatcgttgttctgaactaggtaaagaactgacggaaatctacaaagataaaaatccattggtcgttggcgtattaaaaggagctgttccttttatggcagacatcgtccgagaaatggactgtcatttggaattggactttatggatgtttctagttatggaaacgcgacaatttcttctggcgaagtgaagattttgaaagatttggatacaaatgtcgaaggccgagatatgctgatcgtagaagatattattgatagcggtcgcacattagcctatctagtagacctatttaaatatcgcaaagcaaagtcggttaaaatcgtgacattgctagacaaaccagaaggacgtgtggtgaaaatcgatgccgactatattggctttgatgtaccgaacgaatttgtggtcggctatggattggattacgcggaacaataccgtaacctcccttatgtgggtgtcttaaaaccaagcgtttatcaatcaaattagtgactgatctaaatcagttgtgatacaattaaatggtcaggattgataaaacaaaatagccaaggaggtacgcatgaataagaaaaataacggtatgatcaaaaataccttatattatgtacttgtcttgttagcaatggtcatggtcgtctatttcatttttggaaatggcaatcagcaaacgccaacaatcgagtactcaacatttacggagcagctgaaagacggaaaggtcaaacagtttaccgttcagcctgctaacggtgtttaccggatcgtcggtgaatacaatgccgaacaaaccgtcagcaatgacaatgggctttccgtactaggaagcacgcaagcaagtacgacacgttttacaacgatcattttgccgaatgactcgacattgagcgaggttacgacattagcaaaggatcaaggggttaaaacaacgatcgaagaagaatcgaacagtggtgtttggttatcgttgctgattagtttcttgccaatcgtaatcatcattttcttcttctatatgatgatgagccagcaaggcggcggtggcggcggtggcggccgtgtcatgaactttggaaaatccaaagcgaaagaggccgacaaaaaagccaatcgcgttcgtttctctgatgtagcgggtgctgaagaagagaaacaagaattagtcgaagtggtcgaatttttgaaagatccacgacgctttgtcgaattaggtgcgagaatcccagctggtgtgctgctagaaggacctccagggacagggaaaacattgctagcaaaagcggttgccggagaagctggcgttccgttttactctatctcaggctcagactttgtggaaatgtttgtcggagtcggagcgagccgtgtccgggatctatttgaaacagccaagaaaaacgcaccggccatcatctttatcgatgaaatcgatgcggttgggcgccaacgtggtgccggcatgggtggtggacatgatgaacgtgagcaaacgttgaatcagttattagttgaaatggatggatttgatggcaatgaaggagttattgttattgcagcaaccaaccgttccgacgtgttagacccagccttgttacgtccaggtcgttttgaccgacaaattcttgttggccgtccggatgttaaaggccgtgaagctattttacgagttcacgcacggaacaaaccgttgtcggatgatgtggatttgaaagtcgtagcacaacaaacacctggttttgccggtgctgatttagagaatgtcttaaatgaagctgcgctagtcgctgctcgtcgcaataaaaagaaaatcgatgcctctgatattgatgaagcagaagatcgggtaatcgcaggacctgcgaagaaagatcgtgtcatcaataaaaaagaacgcgaaatggttgcttaccatgaagcgggtcatacgatcgtcggtttagtcttaagccgtgcgcgggtcgttcacaaagtaacgatcatccctcggggccgtgctggcggttacatgatcgcattacctaaagaagatcaattcttaatgacgaaagaagatatgtttgaacaaatcgtcggattgcttggtggacggacagcagaagaaatcattttcggcgttcaatcaaccggagcatccaatgactttgaacaagcaacagctttagctagaagtatggtcacagaatatggtatgagcgacaaactaggtccagttcagtatgaaggcaatcatcaggtcttcgtcggtcgtgattatggtcaaaccaaagcttactcagaacaagttgctttcgagatcgatcaggaagtacgccgtatcttgatggaggcacatcaaaaagcacatgagatcatcgaagaacatcgtgcgcaacataaattgattgccgaaaaactgcttgaatatgaaacattggatgcaaaagcaatcaagtcattgtttgaagaaggcaaaatgcctgctggaactgagaattcagaatatccaagcgaaaaagctcaaacttttgaagaagcaaaacgcgctttagaagagaaagatgctgaaaagcaagctgctgagaaaaaagattttgatcagcaagtagacgaacttcgtcacaataatgaaaaccacgaagcttcatctcaagataaaacagaggacggtcaagagtagtcgttcaattatcaataggtgattagctatcgtaaagtctagggactgtgtcataagtcaaaacaagagaacagattcgaatgaggttcggaccagttgcttgttttacggcttgtgccgcagtcctttcttgttaacaaatcgagaaataaaccgacagaaaacattggcttttctctaaaatggtggcattcagttgaaaaaaaaacaagttcctagtatgattcactaatgaacgaaataaaggagcataaacaatggaagattacttagtaaaagcattagcttatgatggttttgttcgtgcctatgcagtgtctgcaacaaaaactgttagtgaagcacaacaacgtcatgatacttggaatacagcatcagcagcgctaggccgcgctatggttggaagcctgcttttgggcagcacgttaaagggtgatgacaaattaacggtcaaaatccaagggaacggacccgctggagcaatcattattgatagcaatggtcgtggagatgtcaaagggtacataaaaaatccgcatgtcagcttgccgctaaacggacaaggaaagttggatgtgcgaggagcagtaggagatcaaggaatctttactgtaatcaaagatttagggttgaaagaaccgttttctggacaaacacctattgtctctggagaattgggagaagacttcacttattacttagcagtttctgaacaaatcccttcggccgttggattgagtgtgttagttgataccgatgattctattcgaacagccggtggtttcttactgcagatcatgccgggagcagatgaaacggttattgattcaatcgagaaccgcctgcaagaattaccacgagtgtcatcattgctggatgaagggaaatcgcctgaagaaattttgacggtattgttgaatgacaccaaagtcgaagtgttagaaaaaatgcctgttcaatttcgatgtgattgtagcaaagaaaaatttgcgacagcgatcattacattaggcgcggatgaaatacaagaaatgatggatgaagatcatggtgcagaagctgtttgttcattctgcggtaataaataccatttcgatgaacaagaacttgctagattaaagaaagaagctgaggcatagaagatggcgatacacagctggaaaatcggtaatgtcgaaatccctaatcgagttgtcgttgcgcctatggcaggaataaccaatgcggcgtttcgcgtaacggtcaaagaatttggcgcaggcttagtcgtttgtgaaatgatcagtgattggggaatccaactacgaaacaaaaaaacattagaaatgctttatatagatgaaacagaacatcctttaagcttgcaaatttttggtgggaataaagagtctttggtcgaagcggctcaatttgtctcagaaaatacagcagcagatatcattgacatcaatatgggttgtccggtaaataaaattattaaagcggaggctggtgcaaagtggctattggatccagacaaagtctacgaaatggtgcatgcagtagctacggcaattgataaaccggtcacagtcaaaatgcggatcggttgggatgatgaacatattttcgctgtccaaaatgcgcaagctgctgaagcggcaggtgcagcggcgattgggatgcatggccgcacgagggtccaaatgtatgaaggagcggctaattggtcggtattaagagaggtgaagcaagcaatttcgatcccttttatggggaacggagatgttcggacaccagaagatgccaaacgaatgctggaagaagtcggcgcagatgctgtcatgatcggacgagcagcattggggaatccgtggatgatccatcgtacaaaacattatcttgaaacgggagagctgatcgccgaacctactccacgggagaagatcgctacagccaaacttcatttggaaaggcttgctgatttaaaaggtgaatttgttgcttcccgagagtttcggcagcatgctgcctactatttaaaaggcatttcacgggcagctaaagtcaaagcggcaatcaaccagacagagaataagcaagcgattattgatctgttagatgcatttgtagaaaagacagaaaaacaacctgtcggaaatactcctgagtaaagtaaaatcaagtcgatcttgaacttcggcttgattttttgtggcatcattggcattataagaaggaaacccaagttaagaatggaggaaaactcgtgacagaggaacgacaaaaacaagaagaattaaatgatcaaatgttggttcgccgtgaaaagatggaaaaattacgggaagaaggcattgatccctttggcaagcgctttgaacgtacgcataattctgccgagttgcatgagttatttgatcaacgaacaaaagaagagttaacagagatgaatctttctgcaagtgttgctggacgaatggtgacgaaacgtggtaaagggaaagctggctttgcacatttgcaagatcgtgatggtcagattcaaatttatgtccgcaaagatcaagtaggtgacgaaccgtatgaaggatttaagcatgctgacttaggtgatttctttggtgtctcaggggagatcatgaaaactgatacgggggaagtaacgatcaaagcaaaagaaatcgttattttgtctaaagcgttacgcccactcccggacaaataccatggacttaccaacatcgagcaacgttaccgtcaacgttatctggatttgatcagtaataaagatagctttgaccgattcatgaaacgcagccagatcatcagtgagattcgtcgctatttggatggtcatggctacattgaagtggaaacgcctgttttgcataatcaagcgggtggggcagcagctcgtccatttatcactcatcacaatgcgttagatattgatctatatttgcgaatcgcgcttgagttgcacttgaaacgattgatcgtaggtggtatggagaaagtctacgaaatcggccgggtcttccgtaatgaggggattgatactacccataatccagaatttactatgttagaagcttatacagcctatacagatttcaaagatgttatggatctaactgagggaattatccgcaatgcagcagagaaagttttagattctgctgtgattacttatgatggacaagaagtcgacttggcgagtgattttgcccgcgtgcatatggtcgatgctatcaaacaacaaacgggtgtcgatttttggaaagagatgacaatcgaagaagcacatgctttagcaaaagaacaccaagtggaagtcactccaacgatgacagtaggacatgttatcaatgaattctttgaaacgtttgttgaagaaaccttacagcaaccgacctttgtttatggacatccggtagaagtctcacctctagcgaagaagaatccaaaggaccctcgatttacagatcgttttgaactatttatcgtaggccgggagtttgctaatgcttttaccgaattaaatgatccaattgatcaaagacaacggtttgaagcacaagaaaaagaacgacaagaaggaaacgatgaagctcatggagtcgatgaagacttccttgaagcgctagaatacggcatgccgccaaccggtggtttagggatcgggatcgatcgtctagtcatgctgttgacagatgcacaatcgattcgcgatgtgctgttattcccaacaatgcgttgataattcataaagagagacacacgggtgtttacttgtgtgtttctttttttaccagtagttccctccaaaatgactaacaagaaaaaaacaagggagaaactcactgctaaatggaacgaaaacgaattaaaaacgaacgatgaattcattggattgtaagaatgaacgcctttgagaaattacgaaaataagagagaaagttattgacctgacagcatttagttggtatattattacatgtgccaaatgacaaaaatcatttctaaaagaaaatgaaaaaagttattgacgccagaaccaacagatgatattataacgaagtcacaaatttaagaaatcaatttgatgctgatgcagcaacaaaaaagattgaaaaaagttgttgacaaataacaattcatttgttattctaatgaagtcgctgatgacgcacaggaagttgttgaataaacactttcgaaaaaaacttttaaaaaaagagttgacattcacttgttgatctgatatgatttaaaagttgctaacgcagcgcagtagacctttgaaaactgaacaaagcaagcaaacgaaccaatgtgtagggcgcttcatttatgaagcaaaatacatgcaagcaatagctagcaaagttaattttatttgagcttaacgatcctatggatcgttcaaacaaatcattatgagagtttgatcctggctcaggacgaacgctggcggcgtgcctaatacatgcaagtcgaacgctttttctttcaccggagcttgctccaccgaaagaaaaagagtggcgaacgggtgagtaacacgtgggtaacctgcccatcagaaggggataacacttggaaacaggtgctaataccgtataacactattttctgcatggaagaaagttgaaaggcgcttttgcgtcactgatggatggacccgcggtgcattagctagttggtgaggtaacggctcaccaaggccacgatgcatagccgacctgagagggtgatcggccacactgggactgagacacggcccagactcctacgggaggcagcagtagggaatcttcggcaatggacgaaagtctgaccgagcaacgccgcgtgagtgaagaaggttttcggatcgtaaaactctgttgttagagaagaacaaggatgagagtagaacgttcatcccttgacggtatctaaccagaaagccacggctaactacgtgccagcagccgcggtaatacgtaggtggcaagcgttgtccggatttattgggcgtaaagcgagcgcaggcggtttcttaagtctgatgtgaaagcccccggctcaaccggggagggtcattggaaactgggagacttgagtgcagaagaggagagtggaattccatgtgtagcggtgaaatgcgtagatatatggaggaacaccagtggcgaaggcggctctctggtctgtaactgacgctgaggctcgaaagcgtggggagcgaacaggattagataccctggtagtccacgccgtaaacgatgagtgctaagtgttggagggtttccgcccttcagtgctgcagcaaacgcattaagcactccgcctggggagtacgaccgcaaggttgaaactcaaaggaattgacgggggcccgcacaagcggtggagcatgtggtttaattcgaagcaacgcgaagaaccttaccaggtcttgacatcctttgaccactctagagatagagcttccccttcgggggcaaagtgacaggtggtgcatggttgtcgtcagctcgtgtcgtgagatgttgggttaagtcccgcaacgagcgcaacccttattgttagttgccatcatttagttgggcactctagcgagactgccggtgacaaaccggaggaaggtggggatgacgtcaaatcatcatgccccttatgacctgggctacacacgtgctacaatgggaagtacaacgagttgcgaagtcgcgaggctaagctaatctcttaaagcttctctcagttcggattgtaggctgcaactcgcctacatgaagccggaatcgctagtaatcgcggatcagcacgccgcggtgaatacgttcccgggccttgtacacaccgcccgtcacaccacgagagtttgtaacacccgaagtcggtgaggtaacctttttggagccagccgcctaaggtgggatagatgattggggtgaagtcgtaacaaggtagccgtatcggaaggtgcggctggatcacctcctttctaaggaatagtacggaagactacacatcgtttgcctttgttcagttttgagaggtttactctcaaagataaatacccggggccttagctcagctgggagagcgcctgctttgcacgcaggaggtcagcggttcgatcccgctaggctccattaacgacagaggtcgttaagtttgttcattgaaaactggatatcgaagaaaatcaaaacaagtaacacacaccgagttgacaagttaaagagttttttaataagttcaacgcttattttcttgagcaaccttctatcgctagaagaagtactcagcgaccgtaaggtcaaaggttaagtgaataagggcgcacggtggatgccttggcactaggagccgatgaaggacgggactaacaccgatatgctttggggagctgtaagtaagctatgatccagagatttccgaatgggggaacccagcatcttttataggatgttacacagttgtgaatacatagcagctgtgaggtagacgcagagaactgaaacatctaagtacctgcaggaagagaaagaaaattcgattccctgagtagcggcgagcgaaacgggaaaagcccaaaccaacaagcttgcttgttggggttgtaggactccgatatggtagttgaaacagatagtcgaaatacttggaaaagtatgtcaaagagggtaaaaaccccgtagatgaaatctggctcacacctaggaggatcctgagtacggcggaacacgaggaattccgtcggaatccgggaggaccatctcccaaggctaaatactccctagtgaccgatagtgaaccagtaccgtgagggaaaggtgaaaagcaccccggaaggggagtgaaatagatcctgaaaccgtgtgcctacaacaagttagagcccgttaatgggtgatagcgtgccttttgtagaatgaaccggcgagttacgatagcatgcgaggttaagttgaagagacggagccgcagcgaaagcgagtctgaatagggcgaatgagtatgttgtcgtagacccgaaaccatgtgatctacccatgtccaggttgaaggtgcggtaaaacgcactggaggaccgaacccacgtacgttgaaaagtgcggggatgaggtgtgggtagcggagaaattccaaacgaacttggagatagctggttctctccgaaatagctttagggctagcctcggaattgagaatgatggaggtagagcactgtttggactaggggcccatctcgggttaccgaattcagataaactccgaatgccattcattcatatccgggagtcagactgtgagtgataagatccatagtcgaaagggaaacagcccagaccaccagctaaggtccccaaataactattaagtggaaaaggatgtggggttgcacagacaactaggatgttggcttagaagcagccaccatttaaagagtgcgtaatagctcactagtcgagtgaccctgcgccgaaaatgtaccggggctaaatagtttaccgaagctgtggagtgcaccataaggtgcattggtaggagagcgttctaagggcgttgaaggtagatcgtgaggactactggagcgcttagaagtgagaatgccggtatgagtagcgaaagacaggtgagaatcctgtccaccgtatgactaaggtttcctggggaaggctcgtccgcccagggttagtcgggacctaagccgaggccgacaggcgtaggcgatggacaacaggttgatattcctgtacccgttgtttttgtttgagcaatggagggacgcaggaggctaagaagtgcagactgatggatatgtctgttcaagcagtgagtcttagtgggagtcaaatgcttctactttcaaggacaagctgtgatgaggagggaaataatagtaccgaagcttctgatgtcacactgccaagaaaagcttctagtgagaaaacaatggcccgtaccgcaaaccgacacaggtagtcgaggagagcatcctaaggtgagcgagagaactctcgttaaggaactcggcaaaatgaccccgtaacttcgggagaaggggtgctgctctaacgagcagccgcagtgaataggcccaagcgactgtttatcaaaaacacaggtctctgcaaaatcgaaagatgacgtataggggctgacgcctgcccggtgctggaaggttaagaggagtgcttagcgtaagcgaaggtacgaattgaagccccagtaaacggcggccgtaactataacggtcctaaggtagcgaaattccttgtcgggtaagttccgacccgcacgaaaggcgtaacgatttgggcactgtctcaacgagagactcggtgaaattttagtacctgtgaagatgcaggttacccgcgacaggacggaaagaccccatggagctttactgtagtttgatattgagtgtctgtaccgcatgtacaggataggtaggagccgtagagatcgggacgccagtttcgatggaggcaatggtgggatactacccttgcgttatggccactctaacccgcagcccttatcgggctgggagacagtgtcagatgggcagtttgactggggcggtcgcctcctaaaaggtaacggaggcgcccaaaggttccctcagaatggttggaaatcattcgaagagtgtaaaggcagaagggagcttgactgcgagagctacaactcgagcagggacgaaagtcgggcttagtgatccggtggttccgcatggaagggccatcgctcaacggataaaagctaccctggggataacaggcttatctcccccaagagtccacatcgacggggaggtttggcacctcgatgtcggctcgtcgcatcctggggctgtagtcggtcccaagggttgggctgttcgcccattaaagcggcacgcgagctgggttcagaacgtcgtgagacagttcggtccctatccgtcgcgggcgttggaaatttgagaggagctgtccttagtacgagaggaccgggatggacttaccgctggtgtaccagttgtctcgccagaggcatcgctgggtagctatgtagggaagggataaacgctgaaagcatctaagtgtgaagcccacctcaagatgagatttcccatttctttaagaaagtaagatccctgagagatgatcaggtagataggtcagaagtggaaggccagtgatggttggagcggactgatactaatcgatcgaggacttaaccacgattgaaaaaagcaaggaaactcggaagagttttgattcttcgatccagttttgagtgagcaatacttactcaattgaatagtgtggtggcgatagcgagaaggatacacctgtaaccatgccgaacacagaagttaagcttcttagcgccgattgtagtgaagggtttccctttgtgagagtaggacgtcgccacgcgttttttttaaattatgggggtttagctcagctgggagagcatctgccttacaagcagagggtcagcggttcgaacccgttaacccccatatgagccgttagctcagttggtagagcatctgacttttaatcagagggtcacaggttcgagccctgtacggctcatagtaataacctatgcgggtgtggcggaattggcagacgcactagatttaggatctagcgccttcgggcgtgggggttcaagtcccttcacccgcacttcattgccggcttagctcagttggtagagcatctgatttgtaatcagagggtcgagggttcaagtcctttagccggcatcaggaatacgcggaaatagctcagtggtagagcaccaccttgccaaggtgggggtcgcgggttcgaaccccgttttccgcttttgccatcgcaatcagccggggtggcggaactggcagacgcacaggacttaaaatcctgcggtgagtgatcaccgtaccggttcgattccggtcctcggcatttcttaatatgcgcccatagctcaattggatagagtgtttgactacggatcaaaaggttaggggttcgactcctcttgggcgcgttttagcaacgggaagtagctcagcttggtagagcacttggtttgggaccaaggggtcgcaggttcgaatcctgtcttcccgattatattttcaaaaggggccttagctcagctgggagagcgcctgctttgcacgcaggaggtcagcggttcgatcccgctaggctccatatcatttgaataaatgattttttcgcggtgtagctcagctggctagagcgtccggttcatacccgggaggtcgggggttcgatcccctccgccgcgattattaagagcctggacctttagctcagttggttagagcagacggctcataaccgtccggtcgtaggttcgagtcctacaaggtccattgtggcattgtatatgttggaggattacccaagtccggctgaagggaacggtcttgaaaaccgtcaggcgggtaaaaccgtgcaagggttcgaatcccttatcctcctttactgaactcttgatcggattgtagatcaatgagtccagcttttaattacttaaagcagctattgtaattagtaatttattatcgcgggatggagcagtctggtagctcgtcgggctcataacccgaaggtcgtaggttcaaatcctgctcccgcaattgcttctgttaatacaatagaagcgtcaaataaaaactaaaatatggtttggtagttcagttggttagaatgcctgcctgtcacgcaggaggtcgcgggttcgagtcccgtccagaccgccatgcgggtgtagtttagtggtaaaaccacagccttccaagctgttgtcgcgagttcgattctcgtcacccgctttagtttttattttttgggcctatagctcagctggttagagcgcacgcctgataagcgtgaggtcgatggttcgagtccatttaggcccattgaactatatattttgttacatttggggaagtactcaagtggctgaagaggcgcccctgctaagggtgtaggtcgggaaaccggcgcgagggttcaaatccctccttctccgttttagcggtccgttggtcaagtggttaagacaccgccctttcacggcggtaacacgggttcgagtcccgtacggatcattgcaacactttttggaggattacccaagtccggctgaagggaacggtcttgaaaaccgtcaggcgggtaaaaccgtgcaagggttcgaatcccttatcctcctttactgaactcttgatcggattgtagatcaatgagtccagcttttaattacttaaagcagctattgtaattagtaatttattatcgcgggatggagcagtctggtagctcgtcgggctcataacccgaaggtcgtaggttcaaatcctgctcccgcaatcaaaaaaactaaatatggttccgtggtgtaggggttaacatgcctgcctgtcacgcaggagatcgcgggttcgattcccgtcggaaccgttatggctcggtagctcagttggtagagcaatggattgaagctccatgtgtcggcagttcgattctgtcccgcgccatcttgcgggtgtagtttagtggtaaaaccacagccttccaagctgttgtcgcgagttcgattctcgtcacccgctttagtttttttattttgggcctatagctcagctggttagagcgcacgcctgataagcgtgaggtcgatggttcgagtccatttaggcccattgaattttacttggtccgttggtcaagtggttaagacaccgccctttcacggcggtaacacgggttcgaatcccgtacggatcatgaaagcatcctttggaatgctttttttttatgttttaaaaaaggcaattttaaaagtttttccataaattaggcacagtaggtcaaaatttgttataatcagtccgttgcaagttcccgaaaggattcgcagctgcgaagatgccttgtaaccgaatcgaaatttagggggaatacaaaaaatgacagagaaacatttatttacttcagaatctgtatctgaaggacatccagataaagtggctgatcaaatcagtgatgctattttagatgcgctgcttgctgaagatccaatggcacgggttgcctgcgaaacctcggtgacgaccggattagtattggtctttggcgaaatctcgacaagtgcctatgtagatattcaaaaaattgttcgcgaaaccatcaaaggaatcggttatacacgggcaaaattcggctttgacggtgacactgtggcggtattggtagccattgatgaacaatcacctgatattgctcaaggcgttgacaatgcattagaagtacgcgatgaagcgaatgaagaagaaatcggtgccggagatcaaggattgatgtttggttttgctgttgatgaaacaccagaattgatgccattaccaattgcattgagtcaccgtcttgttcggcgattagcagaactgcgtaaaacgaatgaattgacctatttgcgtcctgacgcaaaatcccaagtaactgtcgagtatgatgatcaagatcagcctcgtcgagtggatacagttgttatcagcacacagcatgatgatgcagtagacaatgaaacgattcgtcatgacgttattgaaaaagtgattaaagaagtgataccagcttctcttttagacgatgaaacaaaatattatatcaatccgacaggacgatttgtcatcggtgggcctcaaggggatgccggattgactggtagaaaaatcatcgtagatacttatggtggatatgcaagacatggcggtggcgcattttctgggaaagatgcaacaaaagttgaccgttctgctagttatgctgcacgctatattgctaaaaatatcgttgcagcgaaacttgcccgaaaggtagaggttcagctagcttatgcgattggtgtagcacaacctgtatcgattcgaattgatacgtttggaaccggaaaagtcagtcaagagaaattgatccaagctgtaagagagaattttgatctgcggccagctggaattatagaaatgttgaatctacgtcgtccgatttatcgtcagacagcggcatatggacattttggtcgtacagatatcgacttgccatgggaacaaacagataaagtggatgctttattggcaagtgtgaaggaataaagaggcgacctctgttgatgtaaatcaatagaggttcttttttttgacttagaagagggggagaatgatgaaaacgaatgtgacacgtgtgacgattgctgtttttgttgcaacatttatgacggctatcgaagggacgatcattacgactgctatgccgacgatcgttggttctttacacgggatcgagatcatgaattgggttttttcgatttacttattgactagtgctatgttgacacccatttacggtaaacttgccgataccattggtcgtaaaccgatttttttatttgggacactgctctttatgattggttccgcactctgtggcttgtcaaacagcatgctgacactcatcctttcgagagctgttcaaggaatcggggctggtgcgatgatgcctgttgcattgacgatcatcgccgacttgtaccctgtagaaaagagagcgaaagtcttgggtttgaacagtactgcttgggggattgctagtgtcgtcggtccattagctggtggtgtgattgttgatacagtcggttggcactggatcttttttattaatgtgccgattggtgtgtttcttcttggcatgatttggttttattttcatgaaaacaaaaagacgaagaaatctgagaaaatggatttacttggtagttttttgatgatggtcacattagtttctctgcttttagggtttcagttactaggcgatcaggggttaagtgttgctgtggtaagcttactgattttgactattgtaacattcctgctgttttatcgagtagagaaaaaagcagcagatccattaattgatttagcgttattccattctagaacttttgtggtagtaaatattgtcgcagcactagctagcggttttttgatgggtatcgatgtgtatatcccaatgtggatgcaaggagtcttaggaatgagtgcaggtatcggtggtcttgtactagcaccgttatcgattttatggatggtcggctcatttctagccagccgctggttgctgaagcggtcggtttcatgggtcctaacggctagtctattaattacgcttgttggcgcaatctggctttttattaccccaatgaaaacgtcttttctctggtttttaggaatctcttcaattaccggaatcggattgggagcgacgatggtcgtttgtaccgtgactgctcaaaccagtgttcctcattcacaaattggggtagcgacctccttcaatacgctattaagaacaattggtcagacaatcatggtttctgttttcgggatcgtcttgaatatcagcaataattttggattgaaagaagcaggtattcaagatcaggaaatcatgaatcgcttagtggacccaactgctgctaagaaactttcaacagacattctgcttcaattacgaggaattttgtacgatggattacattgggtatatggattaggattgttgctgattgtgcttgctttggtgtttgcccgtacaattcggcgagaatctggtacaatgataaaaaaagaatcgcaggtgatttgatggcttttatacaagcaaatatctattcaaatgttcttgaaatggaagtaatggtaaacgtgattctcccccaaactaccatcaaaaaggtaggtacaactacaaaaaatgatcaaaaagaattaccagttctatatctattacatggaatgggcggtaatcatagtgtctgggaaagacgaacttcgatcgagcgctatgtgagcgactatcaaatggcagtgatcatgccttcgactgatttggcttggtatacagatacaacttatgatatgaagtactggacctttgttgcagaagagttaccgcaaatctgccgagagctgtttcctcaattgagcagtgatcgagagaagacatttgctgctggtctatctatggggggctatggtgctgttaagttgggtttgcgtaaaccagagagttttgctgccgttgcctctttgtccggggctttagcgattgctgaaagcatggattctcttttaaagattcgaaatacttcttactgggaagggatttttggcccattggatcagtttcaaggttcagagaatgatttgatccatttgatcgatacgattgatccgcaaaaggcaccgcgcttttatattagttgtggaacagaagaccaactgtttcctgcaagtgaatatgcagttgcaaaaatgcaggaacgtgacttggcagtgacatttgagtctggttccggagatcacgattggcaattttgggatcagtggatccaacgggtattaaactggctcgttgaaggaaaataaaaaacatcagagaccgaagaatagtcaacggttctctgatgttttttttcgttcgatacaaaacaggactggtggttggttgcgctgattgatgaattgataggacagcacgttaaattgcgcttgtggtaattgacgacaaaagcgatgaacagcttctaactcttcaggtccgccttcgtggccataatagcatacaaggatgatccgaccgcaaggaacaatacgttggatcaatgcttgcagtgcctgttcggtcgtctcaggtaaagtaatgatttttttatcgctctttggtaagtaacctagattgaaaatagctgcatgaacggcatcagggacgtaatccgctactgtttcatgtccttggtggatcagttcaacttgcggcaggagtccttttgctaacaagcgttcttttgttgttgttactgcttgttcctgaatatcaaaggcatagactttgccttcaggtccgactagtgttgccaacagctcggtatcatggccatttcccatggtggcatcaactacggtctgtcccggtttgacgacttcttgtaaaagggtgtggctataacgcatggctgtttgtagcatagatagcctcttttctaacatcaaattttccttgataggagtcgcggcgcaacatttctttatcgatctcattcaagacttcccattttttgagactccacataggtccaatcaaagcatcccaaggagcgtcacctgtcagacgatgaatgatgatctccgcaggaatcatttctagttggtcgcaaatcaaagagacataagtctctctttgcatcaattgcagcttgccttcatgatagtcccggagcatgcgggtatttcgcatcaaatgcaagagatggagtttgatcccttgaatatctgagtccaagattgttttccgcacattttcccgcatcatttctaatgtttcaccagggagtccattgatcaaatgggtacaaacctgaatgccatgttttctcaatttagcgacaccatcaagatatgtttgataatcatgcgcacggttgattgcgttgctggtggtttcaaaggttgtttgtaaccctaactccacccacaaataaaagcgttggttcaattcagctagatagtctaccacatcgtctggaagacagtcaggacgtgtaccgatagaaacaccaacgacacctggcatggtcaaaacttgttcaaaccgctctcgaatgactgcagctggggcatgggtattggtgaaattttggaaataaacgatgtacttatcgacatgaggccattttttgtgcatcacatcgatttctttatgaaattgaacgggcagcggggcttcaggtgcaacgatcatgtcgcctgaaccagatacgctgcaaaaggtacaaccaccttttgcaacagtaccatctcgattgggacagtcgaagccagcatcgatcggtactttaaatattttttcaccaaattcctgacgcaatgcataattccaagaatggtaacgtttatgctgattttcggcataggggaatgaattcatggattttaccttcttttcttttttctaagattgtttttgttggaaacgccagacaaaacgcttttctaaatagtacggataggtcagtaacagccaagagagtcccacacaaaatccgccgagtacgtcgctaggaaagtgaacacctagatagatccgactgataccgatcagaaaaatcagtaagccaagcaagattctcataccccagcgtaacgcttgtgactggaaaaagacaggaatcagcaaaagtaaggttccataaaataccatgctgccagtggagtgtccgctaggaaaactagagcttgtctccaacactaaatgttccagtgtaggtctttctcgcataaagaataatttaatcaacggattgaagaccgctgagatgccaatcgtaccgaaactgagccacagtgcttcggaatagaagcgattgataagcaacacgaccaatacaacaatgaaaagcagtccaatcgttactggattagcaaacttggtcacccataggaaaaagtcagtcaaaaaaggataaccgctacggatcaaacgagtgctactttcatcgaaaggattcagccaagttggatagaatttgacaacatagcctaaaaaggcaaaaagcagcaaaaaacagctgccggcgaattgataatacagttttttgttcataaaaaaatcctcatttctacaggcaaacatagtgagtctattataccatttatcttggagggacaaaagacagtggtgcaggggtgtttcttgagggacaatattgtataacaagaaattgtcgcttacttcttctttcgaataatgtacgttagattacaaagagtttacagtttggcgaaaagaaggaaataacttttataaaatcttaagaaattgtatactaaacgtaggaaaaaaatagaagacggaggaacgttcatgaacatgagtttatcgcgcaaagagcgtcgcagagaaggacagtccagtgaattttatcaaacgatgagaaaaagtgccgctgttgtagggacaaccataaccgcttgctcagtagtagcgcctttgctgactccagttcaagcggatgccgtagaaaatactgtggtgagaagtaactttgctgcacctaatacagcagcattcattacagaaatcgcaacttatgcacagcctgttgcccaagcaaatgatctttatgcttcagtcatgatcgcacaagccattcttgaaagcggctggggaagaagtgccctgtcccaatcacctaaccataatctttttggaatcaagggcagtcataatggtcagacagtctatatgaatacagcagagtatttaaacaatcaatggttgactatgaaagaacccttcaaaaaatacccttcttacaaagaatcttttgaagacaacgcacgaacattaagaaatgtttcgctaggaaacggtaattattattatgcaggtgcttggaagagcaatacgtcttcttaccgtgatgcaacccaatggttgacggggcgttacgcaacagctcccaactatgcttcttcattgaatacggtgatccagcagtatggcttgactaaatatgatacaccagcttcaggcaatgccggtggtggagcaacggtcagtacgcctaataccgctacaaatcctgtcagcaagccagcagcgacatcgtcagtttcttctggtagtcaaggctatacagttgcgtcaggggattctgtctggggaatcgctaataaattcggcatcacaatggatcagctatgtagctggaacaatattcgcaataattttatctacccaggacaaaaactgacgatcaatggtggtactgccaaacaaacgacgaatacagggaccatatctaccacgacagcaagtgctggtagttatactgttgcttcaggggactcggtttggagtgtggcgaacaagcatagtatcacgatggaccaattgcgcaactggaacaatatcaaaaatgactttatttatcctggtcaacacttagtcgtaaaaaatgatactgggtcaaaaagtcaggccaacaagactacagcaataagttctgtaaccaatgctggtagttataccgttgcttcaggggactcggtttggagtgtggcgaataagcatggcatcacgatggatcaattgcgcagctggaacaatatcaaaaatgactttatttatcctggtcaacgcttagtcgtaaaaaattctggaaataaacagacaagtagcccgaccacagcttctacgagcatttcttcatcagctggcagtcaaaagtatacagtggcgtctggggactcggtttggtcgattgctaataaatttggtatcacgatggaccaattccgcagttggaacaatatcaaaaatgattacgtctatcctggtcaaagcgtacgggtcagcggtacggcaacggctgcgaatcagacggcaagtacgagcaactataccgtagtatctggcgattctgtctggggaattgcggataaatttggtatttccagagatcaatttattcaatggaataacattaaagacaactttgtttatcctggccaaagcgttcgcgtaaaatagattgctattccgctgtttttttgataggataagtgcaaagaatctttcacatttgagaaggaatagtagaaacgtgttggaatcaagagagtgcatggctggtggaaatgcacagaagacctttcgaactcgccttcaagtgatatttgactgaaatgagtgtttctcagaaccgctcaaagtaggcagatacggcgatggtcgttaacacatcgaggtctgtttcataacagataaaattaggtggtaccacgtttataacgtcctataaaaatcaatagtgatttttataggacttttttttaagttctgctgatttttgatcaagtcagagcaccaatttttaggaggcgtccatagtgaactacaatcacaaagaaattgaaaaaaaatggcaaaaatattgggctaagaaaaatgagttcaatacccacgatcaaccggataaaccaaagttttatgcgttagacatgttcccatacccttctggacaaggattgcacgtagggcatccagaaggatatacagcgacggatattctaagccgcttcaagcgcagccaaggattcaacgttcttcatcccatgggttgggatgcttttgggttgcctgctgaacaatatgcattggataccgggaatgatccggccgagtttacgaaaaaaaatattgaaacattccgtcgtcaaatcaattcactggggtttagttacgattggaatcgtgagatcaacacgacagatcctgagtactataaatggacgcaatggatttttaccaaactttatgaaaaaggattggcttatgaagccgaggttcctgtcaattgggttccagagttaggaacggttatcgccaatgaagaagtgatcgatggcaaaagtgaacgcggcggctacgatgttattcgcaaacctatgcgtcagtggatgttgaagatcacggcttatgcggatcgcttgctagatgatctagaagaagttgattggcctgagagcatcaaagaaatgcagcggaattggatcggtcgttctgtgggtgccaatgtcaccttcaaagtagcgggtagcgatgcagcattcaccgtctttacgacacgaccagatacattgttcggtgccacttatacggttttggctcctgaacatgagttggtacaagccatcactacaccggagcaaaaagcagcggttgaggcatatgttgcagaaacagcgaagaagtccgatttgaatcggaccgatttgtctaaagaaaagacgggtgtcttcacaggggcctatgcggtcaatccagcgaatgggaaagaagtgccaatttggattgctgactatgtgttggcttcatatggtactggtgcgatcatggctgtgccagctcatgacgaacgtgaccatgaatttgcaaaagcttttgggttagaaatcattcctgttctggctggaggagacgttgaagaagctgcttatactgaagacggtcctcatatcaattcagagtttctggatggtctagataaagaagcagcaattgaaaaaatgaaccactggttagaagaacaaggagtcggtaaaaaagaaatcagctaccgtctgcgagactggctgttttctcggcagcgttactggggtgagcctatcccgatcattcattgggaagacggtactacaaccactcttccggaagatcaattgccactacgcttgccaaaaaccgataatatcaagccaagtggtacaggtgaatcgccattggcgaatgtcagcgagtgggtcaatgtcgttgatccagaaacaggcatgaagggacgtcgtgaaacgaatacgatgccacaatgggcggggagctcttggtacttcttgcggtttatcgaccctcacaataaaaatcgcttagccgattttgacaaattgaaacgctggttaccagtagatatctatatcggtggggcagaacatgcggtgcttcatttactttatgctcgtttctggcataagttcctttatgatcttggtgtcgtaccgacaaaagaaccattccagaaattattcaatcaagggatgatccttggggaaaacaatgaaaaaatgtcgaagtctcgcggaaacgtcgtaaatccggatgatgtcatcgaacaatacggagcagatacactgcgcatgtatgaaatgttcatgggtccattagatgcatcgatcgcatggaatgaaaacggcttggaaggcagccgtaaattcctagaccgcgtctggcgtttgatcgtggatgaaaatggcaaaatgcgtgatcgaattactacattcaatgatggcaaactaagtaaagtttacaaccaaacagttaaaaaagttaccgaagattttgaacagcttcatttcaacacggctatttcacagctgatggtctttgtgaacgaagcatataagtccgatgcactaccatatgaatatgttgctggatttgtccaattgttggcaccgattgcccctcatatcggtgaagaactatgggcaattctcggaaataaagagggcatctcttatgtgccatggccaacttatgatgaaagtgcgctagtcgaagatgaaatcgaagtggtattccaagtgaacggcaaagttcgggcaaaagccaaagttcctgcggatgcagacaaagcgacgctcgaacagttagctcaatcaaatgaactggtaaaagaacaattgaatggaaaaacgattcgcaaaatcatcgttgtaccaaataaattagtcaatatcgtcgctaattaattgaaaagagggactgtgccataagtctcctacaagtaaaactctccgaacattaactattattgctcctgcggtgcagggactcctcgtcgcaaaagtcagaggaatctatcctagcaatagactattattcggtttaacttgttggatgatgacttatggcacagtccctctaaacatgtctaaacggtcggagcagatgcaactccgagaaataagtcgaaatacccaaaaatttgaaaagcaatttctgtgtattcctccttatttctcggagtttaacacttctgtccccgctttttttgtacaaaaaagcagcggttcagctgatgcaaacatcaactgccgctgcatactattttttgcgaataatgccgtaaaacaatacagctgtagccactaatggaatgaagatcaccaatagaaagccatttggatatgttgcgcgagtgaagatttctgtggaagtatcatttgtgccgatcaagtggtttgctactaaaaattgtccgaccaatgcgatcattgctagaaaacctactgttgcccctgttccaaagaagatttttttctttgtgctgttcattgcgtctgcccctttaatattctctatgtcccattatacaaaaaaatgaaaaagtcttcaatgcgattttgtcaaatcattgattcgtaatacacttgaaatgaatttgacatatttttttagtcagctgactctttctaagtgaaacggcaatcaaatcattcgctgaactaagaggggtctcgtataatagaattaacgcaaatgaaagcgcagaaagaaggaataaaaatggactatcaatcttttgaaggtcaagaggcttttttcaatgattatcaacgagtagcaaaagcaggttaccaagaagaagaagtgatcgatgacgtgctggaacagctgaatcagcaattgactgcggaccagctaatttaccgagtggaagcggaaaaaacgaaagacggcgaagtctttctgtttcctttcagcaaattcatgtataccgaagatttggacgcagcaatctcgacagaatttcgctatgatggtgctccttatgtctatgaaacctatgaggatgaacaaccataattttcagcaaggtatttaaatcaagaactttttaagaggcatttgcatagacacaaaaataaacacccaaaggatgactcgcttgatgctgtcattctttgggtgtttgttgttaacggataggtgaggcaatgaaaaaatcaaagcaaacgctgagcgatctgcaaatcaccttcataaggttctttttgaccattgactttcaaatattgctcagcgcctttaccagctagaatcacgatatcttgactagcggcttcagcaaccgctgattggaccgcaaggctgcggtccatctgttcttcaataatgacagtaggtgcagtgatcgcagcggctatctcggcagcgatagcacgaggatcctcaaagttagggtcatcagaagttaaatagactttatctgcatactcagaaagcgctcgacccatgtcaggacgtcgtgattctgctttgccgccggcactgccggtcacaaaaatcagccgtccttttggccgcaatgtatgggctagctcactcagtgacttaaagcttaagtagttgtgggcataatcaacgatgattaatgcgccattttgtttttccagaacgatcattcgtcctggaatcgttacattaggcaagacagattgtgcttcttcttgggtagctcccgcaagacaagcagcaacgattgcagcagtagcattgtcgtgattgaattctcctagcaaagccaactgatagtcgccattcacaagaagaatatctttttcagaatggatgcggaatgatttaggatcgcccgattccgctggtaatacttgataatctccatcgcattggccataggtgatcaatggtacttgatgagcagcacaagtttcttttaatagttcaaaataatcgctttgtcggttaatgatcatttgtttactattgtggatcaactcgcgtttgcagaaaagataatcatcaaagtccggatgttctactggaccgatatgatcgggcgaaatatttagaaagattccaatttcataagtgatcccagagacacgtttggttttataagcttgggaagagacttccattactagatgtgtcataccattagcgactgcttcggccatcatagcatacaagtctaacgtttccggagtcgtcaaaactgcttcctgatagttctttccgtcaacagtattttcttcagaggagaaaaaagctactttctgattggttgttttggctaaaatctcccgcacaaaataagcacagctcgttttgccttttgttcctgtgattccaattttaaacagctgatcttgcggattgttgtaaaaagcctgggcaatacaagccatggctgctcggatatctgtaacgatgatgccataggcggaacaattttcataagggtgttccgaaacataacattgaagaccctgagcaacggcactttccaaatagctttctttgaacgcggcacctttacagaagaatagcgtatttgcgtctgtctgacgcgaatcataacttaatgaggtaaagatcaagtcgttcatttcttgtggaacggtataatgccattcttggccgataaactcttttaatagatttgcttcgatcaacaacccgcggatctgatggggggtaatggtaagtagtgacatcttggttctcctcgtttcaaaaagtttagtttattatagcatattcaggcaaatcgaatggaagacagcatgcgattggtcgttcttcttcaataatgtgaagaaactttaatatgttgcaaaaatagattgctcgaagtcctttttcgaattaaaatgaaggggatatgtttgtagaaagttggagagaactgccatggataatcatacgcaatctgcgtcaaaacaattaacgacacaagaaaaaatggctcaaggatcggcttggatgacactgggaaacattggttctcggttgctcggtgcgatctatattttgccgtggtactactggatgggagccaacggagataaagcaaatgcattgtttggaatgggttacaatgtctatgctttgtttttgatgatttctactgcaggaattccagcagcgattgcgaaacagatttcctactacaactcaagagaagagtatcgtacaagtcagcgcttgttcctgagagctttacagttgatggcaggatttggggtagtaactgctggtatcatgtacatagccgctccttggctggcaaccgcatctggtggcggagaagaattgattccaacgatgcgctccttaagcgtggcacttttggtctttccatgtatgagtgtgatgcgaggatatttccaaggaaatcaagacatgaaaccattcgcgatttctcagatcgttgaacagatcgcccgagtcttctatatgctgttggcaacgtttattatcatgcggatggtagaaggcgactatacagctgctgtgactcaatcaacgtttgctgcctttatcggcgttttagcaagtgttctggttttggtttattatttccagaagcagcgggttcggatggatgttttgctggacatgagcaaagaagaaacagagatccaaaccaaagaattggttttatccaccatcaaagaagcgattccttttattattgttggttctgggatcacaatttttaaactagtggatcagtatacctttgttcgaattatgaaaggatttacacaatattccaatgatcagctcttagacatgatggcaatctttggcagcaatccagacaagctgacaatggtcgtgatcggcttagcaacgtcgatggcatctacagggttgcctttaatcagtgaagcagtagcgaaaaagaatcaaggaaatttagctaaattgatcagtaataacctccagttgtattcctttgtcatgctgcctgctacgtttggaatgatcgtattggcgtatccattgtatacattgttttatcgaccggatacattaggggcaagcgtcctcgttgctgcttgtatctctggcttaatcctgggcttgttcatgctgacttctagcatgctgcaagggatgtaccataacacagaagcggttatcttcttctttattggtttgttgctaaaatttattttgcagtatccggccatctggctgttccaagtttatggtcctttagtctctacaacattggcacttggtgtgacttgctggctgaatattagaaaaatgttgactaaaggccacttcaatgccaagttgacctttagaagaacggttttgattttcctgatgactctcattatgttagtgatcgcgctgattgctcggcaattgtttggtctggtcttaagttcggatcgcaaagtccaagcctttattctttctctactggttgcagcagtcggtggcggggcctatatttatatggcattgaaaatccgcttagcagaaaaactactgggctcatcaatgattcgtttgcgtaagaaattgcgaatcaaataacccaataaacctgattagccgctgagatcgcatggatcgatcaggcggttttttcagtaaaaaagatcgcaaagagagaggcgagaaaacatgcgactagataaattcttagcagatatggggtatggctcacgaaaagaagtgaagcaagcaatcaagaaaggcgttgttgcggtcaatggtcaacaagtcaaaagtgataaattccaagtagctgaacaagaggatcaggtttcgtttgcaggagaactggtacgttaccagaaagatttctattatttattgaacaaaccggctggtgtgatttctgcaacgaccgatccggaaaagacagtcttggatttgtttgcggcggaagattatcgccgggatctttttccagtcggtcgtttggataaagacaccgaaggactactgctaattacgaatgatggccagctagctcatcggttattgtcacccaaaaaacacgtcgaaaaagagtattatgcagaagttcgagggatcatgaccgaagaggatcgtcaccaatttctccaaggaatcgaactggatggggaaactctcatgccggcacagctgacgattttaaaggtagacgagcaggccgagacatccacgattaccttgattttgcatgaagggaagtttcaccaagtaaaacgaatggtgcaggcagtgggaaaagaagtgacttatctcaagcgtactcgaatgggcgggttacagctgccgaaagatttggcattaggagagtatcgctcagtgacagaaaaagagctggcacagctttctgctgaaccagcggaagattgaattgttgcagcgaatgaagcctgacggctgtgcccagtatgtggaatgagactagaggcaatgtctctgctgcttcagaaacattctgtccatcaccagagcccaggcagcgctttgatctgcagtgactcttgtgagaatggatgggtcaaataaagttcataggcatgcagctcaaggcgagctgcagtttttttctgataaagagggtctccgacgataggatgtccaatgctagcaaggtggacacgaatctgatgcgtacgtcctgtatctaatacacaatagatcgaagtcgtttgggcattgcgagcggcaatctcaacgtgtgtcaccgcagataagccattgcgtgggtcaatgactcgtttgcgacggtcgtggcgatcgcgtccgatttttttgcgaatggtttggttttgatccaattgtccccagactgttgcttggtagcgacgataaatttgcttactttcaagcattcgtcccaaaataggcaagactaaggggtttttagcaaataaaatgacgccgctggtctctttatctaatcggtgaacgacatagggtcttgtctctggtgaaagatatgcagccagatcattcataagtgtgtcggtttcatttggttggttggggtgggttttgataccagcgggcttattgacaacgatcagatgttcatcttcaaacaacaccgtaatcttctctttgttcccagaaatcactggctgatacgtgtaatctgcttcttctagaagaagcgtgagctgatccccacctgctacttcctgatgaaaaagggctgtttcaccgttgacgcgtacatttttgcgggttcgcagtaaatggcgtactttgcgagggacgagccattcttgttctaataattcccgaatcgttgttcggggatggtcattaggtaatgtaatggtatattccataaaaatccctttctaagttgtgatctatttgctattatagcatctttaagattttcttataaaaaaaacaacaaaaaacagaagtttcgctgatagaattgacgagcaatcttttgtggatgaaatttactgctagagccgtattccaaacggtttgatatatgctacactttgttaaaaggagcgtggagaaatggatttgaaacaaatccttcacaagataaaagaatcgatccaaactttctggcgttggatcaagccttatctacagcaattccatcaatggcgcaaacgcatttggaagaaatatcatgtgaataaaatagttattttactgactttagtgggtattttagtgatgagcggttacttgttttatatcgccaagaataccaaagttagtgaattagaatcaggattgaaagagtccactgtgatctacgatgctaaaggagaagaagctgggcagctctattctcaaaagggcacctatgttgatttaaaaagcatttccccagcagtcgttcacgcactgatctcaacggaagaccggaatttttataatcaccatgggtttgatatcaaagggatcgctcgggcggccttgcggatggtagtcaatcgtagtgcagaaggtggcggtgggagtacaattacgcaacagctagcaaagaatgcctatctttctctcgatcaaacctttagtcgaaaagccaaagaactgtttctagcgattgaaatcgaaaaaaaatactcaaaagatgaaatattggaaatgtatttgaacagttcctatttcggtaatggagtctgggggattcaagatgcttcgctcaaatattttggtgtcaatgcttcagatttgacggtgggagaagcagctaccttagtaggtatgcttaaaggtccatcaatttataatcctatcgatcatccagaaaatgcgacgaaccgccgagatactgttctaggactgatggtggacaacaaaatgctggatcaatctgtggccgatcaagaagagcaagtttcaatagctagcctgttgtacgatggctatggcaattcagaatctggctataaatatccttattacttcgatgcagtgatcgatgaagcggagtcttacggacttgatgcggatgatgtgatgaatcgtggatacaaaatctacacagcactggatcaaaactatcaggcacaaatggaagctgcctataaaaacgatgcgctctttccagaaaatgcgtctgatggaacgatggtccaatcaggttcggtggcattagatccgacaactggcggtgttcaagcattggtagggcgacgaggcgaacatgtttttcgcgggttcaattttgctacccaaatgaaacgctcgccaggttcgacaatcaaacccatcagtgtttatgcacctgcaatcgaagcgggctataatccagatagtattttggaagacaaacctcaaagttattatgaggcaaagaattacgatgggacctattccggtgaagtgccgatgtatcaagcattggctcaaagtttaaatctgccagctgtttggacacttcatgaaattggtctcgaccgcggatacaaaaagactcaggaatttgggctaacattgtcagaatcggacaaatattggggattggcgttaggcggattggaaactggcgaatcaccgttgaccatggctgccgcgtatggtgtctttgctagcggaggctattactaccaaccgcatttgatcaccaaaatcgttgattcaacgggcgcggttattgtagataatacttcagtcaaaggaaaacaagtcatctccaaagaaacagcagacaagatgacaagcatgatgctgggtaccttctctaatggaactggggtcagcgctagcccttatggctttacgatcgcaggaaaaaccgggacaacggaaacaaactttgatttatcaaaagtcaatgatcagtggatcgttgggtatacacctgatctcgtaatctccacctggctgggctttgaacaaacgagtgccgaacactatttgactggaaccagcgggcaagtcgtcggcaagatatttaaagcggaagccgaaagtctgttgccttacagccaaggaagtcagttccaagtagcagatgcctatatgactggtgggaaactgatggcagcagatgaagtgccagatccaaatgaatcaacggacaacgatgactggaaaaaatcagttgacgagtttgccgaaaatgccaaagaaggattaaaagattttggtgagcgtgtcaaacaaggaaccaaagagctttttggtaatctatggaatacgatcaatggtaattgatgttagcttctactgcatgtgcatccgaacagtatgttataataagaaaaaaacaaagtgagggaacagtatggcaaatatttatgacacagcgaatcaattagaacgagaattacgagaatccgaacagtttcaagatttaaaagcctcgtttgatcgtttgaaagaaaaccaagaagcgtatagcttattcaaggagttccaaggcttgcaacaagctttgcaacaaaaaatgatggcaggccaagaaatgacagaagaagaagcacagcaagcacaagaactctctcaaaaaattcagcaagatccaatcgtttcggaattgatgcaaaaagagcaagcatttagtctggtggccaatgatttgaatcgaatcatcatgggccctgtgcgggacttatacgaagcctaagcgctagcctgctgacttaccgcagcacaaaagagtccaagaggggttctcaaacagaggcctcggacttgtgccaattctatgccaatttacagtgctttagatagcgttagaggctaatttgagcggacaacattcgaaggatcggggacttcctcgacccttcgaattttttgttcaaaaaggcgaacaaattttcgtgttttgctgacgaaaaaacaaagaaatgttatgatagaagcaaaagggggaaaggtatcatgcgttttttacatagtgctgacttgcatattgatcgttctttcgaagggatccgcatgttatcggataacgtcaaagagcagcttccgctgatcaatcgaaaaataatcaaaaaactggttgatacggcactggagcatgaagtggattttgttctcttggcgggggataccttccaccaagcccgtccaagtctgcggatccagcatgacttttttcaagagatttcccgacttgcgtcagcagagatccctgtctatatgatctttggtaaccatgattactatgatccgcagcgttattggtttgattttcctgagaatgttgtgctgtttcccagtgagacggttgaaacgatcaaaggcgtaaccagaaatggtgagacctatgctatcagtggctttagttatcagcagccttggattacacagaacaagatcagggaatttcctaatcgccaagcggttgatttccatatcggtatgtaccacggggatagtgcgggggaacattatgcaccattttctgtgagtgaaatgaagcagaaaggctatgattattgggcactaggtcatattcatgttcctaagatcctttcagaagaacctgcgatcgtttatccagggaccccacaaggcaaaacgcaaaaagaacaagatacaggcgttgttttagccactttgagttcccatggtaccgagatccagacggtcgacgtagcagaaatcacatgggcacaacaagaagtctcattagcagcttgtaaggatcagcgttcgattttgcaaacgattttgaaggaggtcaacacgaatcagccacgactgatcaaattagtgctgacagatacggatcagttatcttcagattggttttctgaaaccgaaaaaaatgaaatgatcgcctatttgaacgagcagctgtcaagagacgtattacagacaatttatgcaatcgaagtctacaaaacagagacagacaaaattccattagcgatcccggcgtcctatgttgatcaattactagctatttatcaagacccgtctatttttgctgaaggactgaatgatttgcttcgtcatccgttgctttatcgcgggattgatcaaggtgcctttcaagaagaggtcttacagcagacgaaacacttgctggagaatgatttccagtgggaggaagaagtatgagaatcttaaaagcagaaatcactgggtttggccgttaccatgatcaagtgattgaattttcccaaggaaatcaattgctttttggcaacaatgaaatcggcaagtcgacattgtatcagtttattgcggctatgctgtttggttttcctaaaagaacagctaagaaaaaggattatacccccaaaaatggggccgcttatggaggcagattgtggctagttgtcgaaccttacggggaagtgatgatcgaacgttaccgtcaaatcgatcgaggaagagccaaagtccatttcaacgggcagaccggcgacgaggaaatgctggcacagttgctgcaacccttgaatcagacgttgtttttcgatgtatttacttttcagcaagaacaacttgcccaaattgacaagctgcaagaaaatgaattgcatcaagcactgatttctttgggaatcagtgggagtcaaaagatgctgcaacaagtggctcgctatgaagcaatcaatcaacaaaattataaaccgcggggacaaaaactccctttgaaccaagcgttgaaacgtttggagaaactacaggagaaaattgcccaaaaagaaagcgaagaacatcgcttgcaacagcagtatcagcagatttcacagattcaaaaagaattgcggcaattagaagaacagcagcaagtgcaaagcgatgcttatcaagctgttcaacaacagatcagccattggccattgtatgaagaatggcaacagctatcaagccagccagctgcagtagcagaaaaagacgctcaggaaatcagcagattttatcagacctatcagcacttaacagaagatattcatcaaaaagaagcagaacttgatcgtttggaacaagggcaagcttcagataaatatttcttttatctggacaacgaacatttgatcactcagatccttcagaaacaagttgagatggcccgattgatggatcggcaggaacaggcgctagaaaaggaacaacaagcacgaatggcgttgaaccagctgatcaatagacggcaatggtcaaaagaatcaccaccactgcagacagaacaaatccaggaacaattaatgaatctggagcaaagcgactaccagttagaggaagcaaacaagcgcttagagtggttagaagagaaggaaaatcatcttcaacatgctttatcacggttggaacaggcgcacccaggattgatgggagagcaaaaaatggctattcctatggtgccattagtaggtggtttggttgcttgtgttgcagcattctttttaccgtctccttggcgctggttgtgtatagcggctggcaccgttggtattggactagcaatttgggaggcaatgaaacaacgtcctcataaacaaggtgacagcaaaaaacaatggcaagagttattgttgcaaacggatctggttgcctcagagatcgcagatctgacagaagccaataatttacaaaaacaacagaatgaacgatggcgtcaggcgctgcaacctttttttggcacggaaccttatcacagatggtcggtcttcttgctgcagtaccaagaggatgttactaattatcagttgcatgctcatcagcttcgcgaagccaaagaacaactgcaagaggtcacagaacagcttcagccttatcaagcgatgtttacaccttttgctgattggttgcccctgcaaaataagacaatactggagcaggctcagctattgcatgaattcaatgaagagatgcaggctgttaaattggcgcgtttacagcagcccagcacgttgttggcgcagcaacttgctcgcaaaaaggcggagcgggctgaattgttgaaggcttctcaagagattctctcacaagttggcattgatcagccagcagaaatcagtctttggctcaaacaatgggagacgcatcagcgggcggcaaagcgggaagccgaattagcagtcatgctggatccgattttcccggaaccaatcacacaagaagaattgctggaaaagaaaacgcaagtggcacaaaagcaaaaagagctgcaccagcttagtcgacaaaaggcagagcaaaggcaacggcttgaactagaagtagccgccagccaaaaaagcggtacgttgagccagctctatcaggaagaaagcgaactgcgggcaaaaatcgaggaattggctcttgcttggagcagtcgacaattagctgcttcggtattgtccgatttgacgactgaattgtctgagcaacaattgccgcaattactagaaaaagcttcgatatatttcagattgctttccaatgactgctatcaccaagtaacactgcatgaggggcaattagttgccagcaatgctagcgatagttactcgatcatcgatctatcaacaggaacaaaagatcagctgatcatggcgatccgcttcggttatcttgcgttgcaacaaaatcatcctcttagtcccatcattatcgatgatggctggttgcattatgatagtgcacgaaaagaacggttagcggaattattcgctgagtttggccaatattaccaagtaatttgtttgtcttctgaccaagaaatggtaagctattatcataaataccagcaatccgtacaagaacttagtcaaaggatgtgagaaatttggctatgcgccaaatgttaacatgaaaaaaattcgagaattgaccgtagatgagacgtttcaactgtttttgttgattaaaaatgcggatgttcgtatcgcaaaaaatggcaaaaagtttatcgcgtttacttttcaagatacttctggaacaatcgacggaaagttttgggatgcttctgaggaagaaatcaatcgcttcgaggctggtaaggtcgttttattagatggaaagcgagaagtttatcaaggaaatccccaagtcaagattttgcatctgcgtctggcaaaaccagaagaacctcatgacccgagccagtacatggaaagagcccctctgaaaaaagaagacatggaagaggaaattaatcagacattgtttgaaatcaccaatcctcattggaatcgtatcgttcgttttttgctgaataaatacaagaaagaattttttgattttccagcagctaaacggaatcaccatgcctttgctagtggattggcttaccatacaacgaccatgttgcgaatcggaaaatctttgatcaaagagtatccggaaatcaatgcaccgcttttgtatgcaggaattatcctgcatgatttaggaaaagtgattgaattgacgggaccaatgaccacagagtatacattagctggaaatctggttggacatttagtgctagtagatgaagaaatcacccaagcgtgtattgctctgaaatttgatgataaacaagaagatatcgttgtgctgcggcacatggttttggctcatcatggattgttggaatatggctcaccagttcgcccaagaattatggaggcggagatcctgcatcaaatcgataacatcgatgcttctatgcaaatgatgttgtcatctattcgcttaacggaaccaggagaatacactgagcggatttttgggatggataatcgtagtttttatgtgccgaaagatgtataaataaaaaaagattggcttttgccaatcttttttttctgttatttttcagaggaatctgtagcagatgaactagttgtttcagttgattcttttgtagaattagttgcattctctttgttatctgatgcatctgtagcagaagaatcagttgaatcttttgtttctgctgcagaaacatagtcagaaagaatatcagctagatcttcatctttcattttcacattggcagctttcagttctttaccaatcgtttttgccacgaatgtagaatcgttcaatagcgtgttttgtgcgatttctgtgatttgatctttgtatttatccatgtcgttgcctttgtcttggtttttgaccattttgacaatgtaatagcttgttgtataagtagaagcatccgtagcagaaatgacctctgaaatttcaccatcttttaatgcaaaggcagctgtttgtacttcagctggcacagttgttgaggttgagtcgaatttgactgtaccgccatcttctgcagtcgctgtgtctgttgatttttcttttgctaatttactaaagtcagcaccatctttttgagcttcttttaatacatcttttgcatcatcttcactagtcaatttgatcaattgtgcttcaacttctggatggaaagaatcccaagctgctttcagctcatcatcaccaatatccatgttcgcttttagcccttcttgtaatgctaattgctgtctgatttgttcacgatagctttttttagtaagtccagaagcttccaatgcagactcaaatttatcactgtcgccatattgtttcgcagtttgatcgtattgcttgtcgatcattttctctgtaacatcatccccatatttttgatcgaagacttttaagacgatcaattggcggataagactttggttattctgatctgtttttgcttgttcgtaaaaatcttcaaccgtgattttaccgcctttcatggttgcaatctcattacttgaacttccggaacaagcagctaatgtcaaaacgctcagtgcactgactgctgctaaaatcaattttttcttcattcgtttaagcactcctattttctaaatatttcaaagaatcacagctaatactataccacactctttttttaattgggaagaaaacaaatgatgtttcaaacaaaattcatagattctccaatatttgctacttattttcttcttggggaactgatttggcttgtatcgtcgtgacatgttggttcaaacgatccacgtgggtctttatccgctcgattcttggctgtgcttggaatttgaatgattcaaaatcttttgtgaaagactctttgacaacaggaatcgtttcgtcaaccgttttacgcgtcaatgtgacagcatcttttaagtttttgacactttcattaaactcaagagtcgcttccgtggtctcatcgacataacgaagcatttgttcacgggtttctttaccgctttttggtgcaaatagcagcccgcctaagccgccggcgagagagccgaataacaaacctttgataaagttaccgatcatttagtccaccagctttccgattttttcagcgatctctgttagctgttcctgtgagtaatcctctgcatgattaccgaaatgcatcgagaaatcatctttttcatcgtaacgaggaatcaaatgaatatgggaatgaaaaacagattgataagccaattctttattgttattgattatgttgagtccattgatctcaggaaaggctttttcgattgcccgagcgattttaggaacgcgagcaaagacctctgcagcaagggcttcatcatactcaaaaatatccgttacgtggactttcggaataactaatgtatgtccaggtgttacttgggaaatatccaaaaaggcatagacttgatcatcctcatatactttgtaactagggatgtcacgattgttgatcttacaaaaaatgcaattttccatttcataaacctccttgttcttctagtcctactttaccatattctgctgatttcggcagtttttgttcttgaattccttcaaaagcaggccatcgcttcttttccatgtaaagtacggatgtttgtggagagaaacgcttgcatttgtccgcttgcaccaatagacttaaaagcagaaatagaaaaggacggatacgatgaaaccaatcattaaagaaacgttacagaaaaaaaagaccaaacgagaaaaaatcagctatcttgcctatgcatataaggagtggctgattgcaggactagcagtcattctagtaggaggttcgctgatctattcgatgacaagaccaaaagaagttgtttatacagtggctgttgtttctgagaccagtgaacagcagcccacacaatctgaatttgaaaaagcagcgacggattgggtgaagcaaaacgtggcgcctgatcacgaaataacagttacatttgtttcctatgaagatccagccgctgtccaagcctttacgacccgtttagctgccggagcaattcaagccgtcatttttgatgcgtccgaagcagacatgtgggtcgagcgttttggtagcagtgagctgccaaaagaaccattgcaagtagctggacacgagtatgttgttcaaataactaataacggaaaatagcagatttcaagaagtagatgactgctctttgaccgctgcttcatggtataatagttgatattggaggaacgaaaatgacattacaagtagaaaatgtaacaggcggttatacacagctacctgttctaaaaaatattgatttttcgatcgcggatggtgaacttgtggggttgatcggtttgaatggtgctggtaaaagtaccacgattaaagaaatcattggtctgctacaacctcacactggaaaaatcactatcaacggactatcgctgaaagaagatccgcaagcgtatcgcaagcagatcggctacattcctgaaacgccttctctttatgaagaattgactttaaaagagcatatcgaagtaacggcaatggcctatgacatccccaaagatgtcgcactgcaacgggcggagcggttattaaaaacatttcgcttagaaaataagttggactggtttccagcaaatttttctaagggaatgaaacaaaaagtcatggttttgtgtgcttttctaattgaaccaagtttgtacatcatcgatgagccttttttgggcttagatccattggcaatcaatgcattgcttgaattgatgaatgagatgaaacaaaccggggcatcgattttaatgtcgacccatatcttggctacagctgagaaatattgtgacaagtttatcctgcttcacaatggcgagattcgagcccaaggaacgctgtcgcaattacaaagccaatttggggctgaaggagcttccctcgatgagttgtacttagcattgacaaaggagagtcagctatgaaggggttcttctcacaacgcttgcaacgacaccagaaacagatgagtcgctatttgcgttatgttttcaatgatcattttgcgatcctcatcacatttctaatgggtggactgggtctatattattcgaattttttaaaaacgctccctcggccgttccctcagggggggatcgtattgctattgatctggttggcacttttgtcagtcggcaagttggcaacattggtgaaaccagcagatttgatttttcttttagctaaagaaaagcagatggcggactatcttgctcaagcactgcgctattcaatgtggctgccttttggggtctcctttttagtcgttggtgcgacgatgcctttagtcgtagtagttactgaacaaacgtttgcgagctttttcttttatttagggacgatttggttattaaaagttacggatctctggttacagcgtttgtctctttatcaaggacaagaacagcgtaacaaccagcgtgttctgtgggtgattgctgcagtaagcagccttttagctagtctgtatgttgcaccttgggttggattgctcttagctgttctacaagctgcttggttcaaccttcagtgtcgtccgacaggtcttctattaggttgggatcgcatgatccacatggaagaaacgagacttcatcgcatttatcggtttatcaacttattcacagatgtacctcaaatcacagcagcagccaaacgccgcaagtatttagatggtctgttgaataggattccttttggacaggaacagacttatcgctatctatatgctcgccgctttttgcgaggggaacaatatagcgggctttttttccgtttgacactgattggtgtattagtgcttttctttgttcaagaatggtggcttagtctagggttaggatgtatgtttctttatttgatcggttttcagctactgccgatgtataatgagtttcagtacatgattttgactcatttatatccaatcgaggaagggcaaaaacagacagccattaattggctattgcttagattattaggcggagctgctttcatttttggtgtagtcggcttgttccgagcggcaattctttggcaaggagtgctagtgctgttgggctttttgttatttacaggactctttttggttttctatgtacctgcccgcttgaaaaaaatgcaaagtcaataaagatggctggacgttactcgaaaaaaccgaacgcatatgcgcttgacgttgactctttaggaagctagaataagagatactgtgaaataaggagagaagctaggatggatattcgcttggatcaagattggcgcctgagaccaatcaaaggcgacaccggcaaagcctacattggcttgaaggacaatgataaagtctttatcaaacgaaatacgaccccgatgcttgcggcactctccaaagaggggattactcctaaacttgtgtggaccaagcgtaccggcaatggcgatacgttgtctgctcaagagtggctagatggacgtgtattggaccccgaagagatcggtcaaagaaatgatgtgatcgatgtattgtatcatttgcaccattccaaaacattagcgaagatgctgagcaaaatcggtggtcaagtgatgacaccagaaaaaatgttagttgaatatgaagaaaacttacctaaagcggttgttcaaaatcgctttattgctattgtttatcgttatttaagagagaatattccagaatttcaggaacaaaaggcctccgtcgttcatggggatgtcaattaccgtaattggcttgtttgccaaaactatctgtatttggttgattgggattcgatcatgtttgcggatcccgcaatggatatcggtacgatcttagggcattatgttccattatccagctggccgcattggctagtgcgttacgggattcatggcagcagtgaagtgatcgagaaaatttattggtatgctttattaagtatgcttcaggaagtaaagaagtactaccaacgcggggattataaagcaatgaatgcagagattctgcaattaaaaagaatttatagtgaatgagaagatggagcgaagcaacaagttccatcttgttttttcggaaaggaaacaacatgagagtaagaaaacgtgcgggagcagaagaattagtccaagcgcatcccgaatttgtagtagctgaaccgacagcgtggaaaggccgttggaaggaacgatttggcaatgatcacccattgcatattgaaatcggtatgggaaaaggccgtttcattaccgaaatggctaaagcacatccggaaattaattatattggcatcgaaatgcaaatcagtgtggtttccattgcactggataaactgatcgaacaagatatccctaatgtgcagctgctgcacgttgacggttccgcattgacgaattattttgcggatcatgaagtcgatcaaatctatttgaatttttcagatccttggccaaaaaagaagcatgagaaacgccgactaacatcgaaagcttttttggcagtcgatgaacaaattttacgtccgaatggtgaaattcatttcaaaacggacaatcaaggcttatttgaatattcactcgccagcttttcacaatatggtatggttttaaaacaagtatggttggatcttcatcaaagtgactatgaaggaaatatcatgaccgagtatgaagagaagttttccagccgcggtcaaagaatctaccgggtagaagcccaatttgtggcaccagaagatacgaccaaaagttaaataagcgagtcctagcgttcagactgtagcacaaggcagaaaatgtctttgttctacagtttttttgtatagaaaagtaaaagctgcgtatctctttttaggagggtgacaatggacatttgtacattttcagatgagttggtggagtatgcgaaggtgcagaaaatgcaagatctatccatactgccaacagtcgaagggatgactctgattttcagcaaaagttactatcggcaaatgtatcgcaaagttactacagaagacgcgcaacaattgatcactcgattcaaatttctgggcggtatggaagtaggagaaaaacgaagagcgcaattaggggctatcagctatcctttggcagatggagagcagcgtatccgggtttcgactgttggggattttcaaggtcaagaaagtttagttctacgttttttgcaccctttaggtaagttccatcgattctttatgaatgaacaatatgaaacgatcgcagatgcatgccgctatcgagggctctatctcttttctggtcctactggatcggggaaatccacactgatgtatcgcttagcttcagctgcagcaggtcaggtgatcacgatcgaagacccggttgagatcgttgagcctcgttttttacagttgcagaccaatccaatgatcggccaggattatgatgagctgattcgtttgtcgttgcggcatcgacctgagctattgctgattggtgagatccgcaacaaagagacggccaaggctgcgatccgtgcggcactgacaggacatcgggtttttgcgacgatccatgcacggggattaacggaaacaattgcgcgattgcaagagctgacagaggaagcagctgtgatcgaccaatgcctccaaggaatcatttatcagcgcttactgccagatcttcacggagtccctcacgcattgatggcctacaccttttatgaaccccacaaatcctcaatgacttgggatcaagcactaacaaggatcagagaaaaggagcagatcacccatgaggtttttgacaaggaaaagtaaacggctttcccgcaaacagacccacgccttattagccacatttacggttttattagagagtggtttctcattacaagagagtttgcttgttctacttcgcagtggccaatttgatccgaatacagtaaaagatattgatcagcgactgaaacaaggtcaacgactcagacaggccttttctttgctgcatttatctgaagccgaacaaaatcagctggacttggcagagacccatggcaatctggtggatacgttgcagcgaatggtcgcttaccagatccttttggaaaaacaaaatcagacattacaaaaagtgttggcgtatccccttctattgctggtatttgtctttaccgctctctttgccatgcgtcggtttctattgcctcaacttctggcctccggtatgatcgatgcgaatcattggggcattctctttattacggcagcaccatggatcggtgcggtcattgtaggcggattgggaggtttcgttcttgttgtaagaggaatctttgccaagcagacagcgttgaagcgagccacttttttgagtcgattgccttttttgggagacttgtatcgctgctatcaaactagttattttgcattagagtggggaaaattgtttcagcaaggcttggaaattcgtcagatcattatgtgcatgcaacaaacaagtacagcaacattagtacaagaactagctgttcaattagagctgtgcttggcaagtggcggattgttgccggacaaattaaaggactatgtatttttgacgccagagttttcattgattgtgttccagggcgaaatgcgtgggaaattaggagaagaattgtttgtttatagtcagcttttgacagatcggcttttccaacaaatcgagaagaaaatccagtggattcaaccagtcatttttttattagtggcccttctgatcgtgggtgtttatgctgcaatgtttttgccgatttacggcaatattcaaggagtgatcgaatgagaaaattgaagcatcaagggttcacattggtggagatgctgattgtactgttagtgatcagtattttgattttattgtttgtaccaaacttatccgcacaacgtacagtgatagatgagaaaggaaatgcggcaatcgtcaaagtcgtagaaacccagattgagttgttccagcttaatgagaatcgaacacctactcgacaagaattactagctggaaattatgtaacggaggagcagtatgcgatttaccttgcccatcggaacgaatagcagtttttttacttggcggggatttacaatggtggagagtttgattgtcctcttagtcgtttcgattttcatctttcttccgctaatagctatcgaccgttaccaagcatattttgaagtgtgggggttttgtgctcgtttggaaaaaggattggcagtagcacaacaaacagcgattattgatgctcgcgaaacgaaagtcgcttattctgattcaccagttcctacgatatattttcattcgacgatcacaggtgaaatcaaaatggagccacttgaagtaccctcgcagctcgcagtacgtgtttttcctgtacttacattcaccagtcaatctggcaattatacgcggatggaaacattacggtttgaatggatggaccaagaaaaaaagattacctacaaatttctttttggaagtggacgatatgataagatcatcgaataaaggatatatcatgctagaaagtatcattggctttggtttgctgacgacgagtgtcttcctttttctgactgtccagacccatattttacagcaaagtgcacagttacaggcccaggtggctgctattcgggtattgtatgaagaagtccaatgccaagcatttgaacaggaagtcgtttattcgacacaacgtacagagtcgtatcagttgtctttcggtttcaagcgtgaccgaagctatggacggattgtaagaggtcctcttatcatggagatcaactatgaagagtaagggttttactttgttggaatgtttgctgtctttaatgatcttaggactcagtgtgttgttgatcaacggaatcattcgccagatgcctcaagttaatcaacagctttttgctcgcaaagaccaagaatggcagatatttttgattcagttagaaagggagcttcaaacgtgtacgtatgtttcagtgagtccgtatacactttttttaaaaagcagcaaagaaaatgtagtcacgatcgatcgaatcaatgggaaagtccgtaaaagagacaataatggctaccatccgttattgacggaagtatcattgatttactttgaaaaaaaggcatcctcgatccagtttacagtgactttcgagaatggagaggtgagaattggtcaatggcagattcctgcataagggcggtatctttttgtcagcaatgatgctgattcatttgctgagccttatgttgctaacggttttagaaaatactcggacaactactgatttctatattaagactcttcacatgtatgaggcacgaatcatgaaagaactttttttggcggattatcagcggttaacctatgccgagcagggcagtgtcaactacaatgtagggagggtcatttacgaacaaaaagaagagctgttgttgattcaatgtgtcgtcaatcagcgcaccttccgttttaccgaaattttgtcaggtgatttggaaaaaatagcaacagatcttgagtaactataatacagaaaaaggcacagacatactgtgtcttttttctgtataaaagagttgaaaagtatgtttgtctcttcacaaattattctgaaagatagcgattgattattttggctgaatcagctaaaattaaacaggtatgtatgttgttatagttttgaaaagaggtgcaagatgtccccagaaaaaatggaagagtcttttcatttatcgctagaagcgattcaagtgctccaaaacgcattagaaacatcttatttggatgcatatatcgagacgatcgagaattttattgatcagtatcgcgtacgggtgatcgacggagtacctagtgaagcggatgctcaacggttggaagcgatttataaaaaattagagcagatacccttaacagcagaagaacggcgtaaacttgctcaactacttctgttaaagggcggacaaaccgaacatctgcagcctaatcatcagctgacaccagatagtatcggttttttgtttgtgtatttgatcgagcaattgacaccagcgaagcaacaaaccaagattctggacctttcggttggaatggggaatcttgtcttaacgctcttgctcaatttgcagttagcgcaaagagatgtgcaagcaacaggtgttgacattgatgaaacattactgagtgttgctgcagctacaagcgaatggactcaagccccgctgcatttgtttcatcaagacgggttgcaagaattgttaatcgacccaatggacattgctgtcagtgatttgccagtcggctattatccacaagatgaaaaagcagcatcgtttcttacttcagctcccgaaggcgaaggacatagctttgcccaccatttattgatggaacaagcaatgaactatgtgaaagaagatggctatggactattcttagctccggctaatttcatggaaactgaacaaagcgattatttgaagaaatggctcaatgaaaaagtttatctgcaaggaatcattcaattgccagacgagcttttcaaaaatgagcgatcaagaaaaagtattgtgctgattcaaaatcatggtgcaacgagcaagcaagcaccagtgttacttgctaaactcgcatctctcaaggaaccaaaaaacatcaagaaatttttcgaacaatttgaagcttggaaagcatcaaatttgtaatataaatcggataaggagaaaattatgtctaaaacaattgcaatcaatgctggaagttcaagtctaaaatggcagttatatcaaatgccagaagaaacggtggtcgctaaagggatcgttgaacgtatcggattaaaagattcgatttttaccatcaaatatggggaagatcaaaaattcgaacaaatcatcgacatcaatgatcatgaagtcgcagtaaaaatgcttttggatcaattgatcgaattgaacatcttaggttcatatgatgaaatcactggtgttggtcaccgtgtcgttcatggaggagaagacttcccggattctgttgtgatcacagatgaagtgatggaacgcattgaagcattggcagagtttgcaccattgcataatccagccaacttgatggggatcactgctttcaagaagatcttaccagatatcattagtgttgctgttttcgatacttctttccacgcaaccatgccaaaacacaactacttgtacagtctgccattggcttactacaacgactataaagttcgtaaatatggtttccatggtacaagccaccgttatgtgtcagaacgtgcggctgaaatgttaggcaaaccgattgaagatttgaaaatcattacttgtcatttaggaaatggcgcatcgatcactgcagttgatggtggaaaatctgttgatacatcaatgggcttcacaccacttgcaggagtgacgatgggtactcgttctggtgatatcgacccagctgtattgccttatttaatggaaaaattagacctatcgatcgatgaaatgatcgatgttttgaacaaaaaatctggtttgttaggactttccggtatttctagcgatatgcgggatcttgaagctaattatgacaaagaagaagtaaaagttgcgtatgatgtctttactgaccgcattcgtaaatatatcggtggctatgtaacaacaatgaacggtgttgatgcaatcgtctttactgctggtatcggtgagaacgatgcccatgtccgcagtgaggttatcaaaggaatgacttggtttggttgtgaacttgatgaagaacaaaatgccaaacgcggcgaagagttagtcatttctacagaagattctaaagtgaaagtcttgttgattccaacagacgaagaattaatgattgctcgcgacgtggaacgtttgcgcggttaattgtcggagatcaattggaacaaatgagtttcattatttgaataaaaaaagtgttaagccttggcttaacacttttttgttttgaacagctgtacaccttggataccaatgaataatgcttgaaagtcgcaaatttggttagcgctattcttatttttctttatattttcagaaaatccaacggtggaactcaaaacttatctagccattttctcatagcttttttgactttggttccatttcgttgtcagaggttgcttggtttaccagcaatccgtccgcaaaggcggccacgtcttcgccagttacttgaagaacacttttttcttgttgcgcattgtcttcaaacaaatccaacagatcaacgagtggttggaaatcgctggcaagatttactggatcaactttcataaagtacttttggatttctttatagacgattcgataatcattcggcaactgatttgcccgtttttgcagagcacgccattcttttttaccttctaatgcttcttttattcccatcttcatccctcactttagttttttggtcacttgattcaagtgttctcgcaatttgtctcgctcatttttggcaccagctgcttcagcgatttctgagatgaaggtagtcatattttcaccgatcacgctattgatcggcagtttttctgcggcactttcttcaaaaagaccgacgatcccttccaagatagggtacagatttcttccagaaaaatcactgtagctccagatcttttgattgtgttcgcgccacgcatcttggtagccagcgggtaacttatcaatacgaagttgaaattctttttgttgcttattcatgtcgttacctgttattttgtcataaaagttcatggtgggcctcctaattaataaatagttgtttgtagcgtttcattgacagaaaagagaaaaaacttagtaatatggctagccacaaaagggtcaagaggctgctttgggaaccaaaagagaatgtaccagcaagcaaattctttgtcgtttcgataatgggcgtcattggctggttctcagcaaataggcgcacaggttttgccattccagcgactggcacaaaggctggactgataaaaagcaggaagatcaaaatatacgaaaaggctcctgctccagcataatcttttgctgttaacgagaaggggatagctagcacagtgagactaacggcaaaaagtacgatcaaaagggtgaaaagcaggaagtcaccaatcgttgcttgtggtcgataacccaatactagtccgatcagcagtacagaaagtacagaaataagcataaaaattgttgaggcgacaatgtgcgatcctagaatcacccaacgtttcattggcatagataataatcgcgtcaggaatccttttgttttatcattgttgatcctcaaagcagtgtaagccgatcccattgccatagacatcagcaaaaatcctggcataacgtagctaagataatctgaaggctctcctgcagtgcccccgactaaaatattgccaccaatgacataaacgaaaaaaagtaagatgaaaataggcataacgatacttgtaatgatcgtatcgacacttgttaaattttgtctaacgatgcggttcgttaatgtgaaaagttgcttgattgtcttcattttttagtcctcctttccagtagcatccaagaatatttcttccaaactaagttcaatcggagcagttgttagaatgtcaatatcattttgcaagagtttcatcatcgactcttttaaatcatttctagcaagaataatggtgtcattttcaatcatatagtgaatcgcagattcgtttagaagagaagtcgcttgatcgatcactttttttggaacgatgactttgtgcagatctcttgcttgctttttcaattcttgtggtgtgccaatcaatgaaatcttcccatcgttgataaaagcgattcgatcagctaaacggtctgcttcatcaaggtattgagttgtcagaaagatcgtctttccttctgctttaagctgaaggattagttgccaaatctctaatctgttttttggatccacaccagtagttggctcatcaagaaacaaaatttctttgtcagggagcagagagactgcaatatctagtcgtcgcttcattcctccagaataggtagcgacttttttatagagaaaatctgctaaatgaagtcgttctgataaggtatctattttcctgcgcagatgagggatgtccaacagcgtgccaattagtttcaaattttcaaaaccggtaaattcatcatctagtgtgatcgattgactattcaagctgatgacatcccgcacttgatcggagtcatttcataggtctaaccctaaaattgttgcattgccggatgtagggctagcgagtgtagttagaatattgatcagtgttgactttccagcaccattttctccaagtaaagtaaagatttcgcctcttttgatttcaagagtaattccttttaatacgtcaagatcaccataggtttttgtaagatgatccacagtgatggctttcatagttatccctcattcctgattgaaaagtgtctcgtgcttgattttatctagctgatctacaagaaacgtccatttactccagaaatcttggaggtaaatttccccatttgcgttcaaacgataaaacttccttgccggtccaaggtcagatttccttttttcaacagttaccaattcttttttttctaaacggagtaagaccgtatagacggtgccttcgacgatatcttgaaaccctaattcgatcagtgtattcgtgatttcatagccataagtctctttgctgttatggatgacttgaagcacgacaccttctagcacaccttttagtaattcagtcattcctttcacatcgctcatcctctcaaaaaccatttgtctcaatacctagtattactcagcactgctacataataatacttagtagatggactgtcaactattaagtatcattaagcagagatgcaaaaaaaagtaacaccttgaaaaaagcttcccgcttagtggcgaatggtactcaggagactggatcctgttaaactgagctttattgtgggctgctctgcaacttcttcgttcgaatctaagtttgcagctaatcatcgaagacagtgattagctgctgctcgccgttgttatcactcttaagaacaagttcaacaagataggctctgatttgatgaattgtgttcagtaaagagaaataggacttcggtaccgatcatggtgtgaatcattgacatgaaatgttagacatcgattgagaagggagcaaaaaaaatcgagatttattgggctctgttatgaaactaaggattgtttcgttagggaatgccgctgatacataggcgcccaatgcacttgatttgactgagacagtaagcaagcctagactaaaagaggaaagctcacaattgctgctctttatgcccagtcggtggaaatgttctgccagatgttgagagaggctgtgtcctgctaaataacaaagaacattgaataaaaaatcgtctgattcagcatataagtgtatgaataaacattgatgtgatgaatcaggttatttttattaacaaattcttgaatctagaataaaaaaacggtaaaaataattttaatcgataaaaaatgttatttaattaacgtacaattttttaggttgttagatcagtgatttcctagtatctagtaaaaaactctcattttcgactcagcatatcgccattttacaaaacataatctaagcaaaataaccttgtaaaggaagccaaacgggaataaactggcatttgtgaattttcagaaaaatttctaaatttgttttttataaggagccagtaagtatggaaaaagaaaagactttcctaggacagccgcgagggttgtcgacactatttttcactgagatgtgggaacgattcagctactatggcatgcgggccatcttagtttactttatgtatgatgctgtaacaaatggtggcttaggcctgcctaaatcaacggctgtagcgatcatgtcaatctacggttcactcgtttatatgtctagtatcgttggcggatggatctctgaccgcttattaggatcgaacaaatccgttttttatggcgggatccttattatgtttggacatattgttctggcagcgcctcttggtattgctgcactatttgtttctatgatgttgatcgttattggaacaggtttgttgaagtccaatgtgtcagggatggtcggccacttatattcgaaagaagatgtgcgccgagatgcaggattttcaatcttttatatggggatcaatattggtggacttttagcaccgatcattgtgggtattttaggacaaaacgtcaattaccatttaggtttttcaatagcagctatcggaatgttcattggtttggtgcaatattatgttcaagggaagacaacgttgaaagatgttgcaacgacaccaactaatccattatctgcgcaagagaaaaaaatctttttccgtaacgttatcatcgtactagtgcttgtagcagtggttttcggcggtgcagctgcgatgggctatctgaccgttgatttctttatcaattgcatcagtatcttaggaatatttttgccgatctactactttactaaaatgttgcgttctcgtgatgtgacaccggatgaaaagaaaaaagttttagcgtatattcctttgttcttatctgcaatcgttttttggtccctagaagaacaagggtcatcaatattggcactttttgcggccgatcggacacaagatacgttgtttgggatcacgattccggcgagtctttatcaaacactaaatccattgtttgtcgtgctgttgacaccggtatttgtttggttgtggacgaaacttggcaataaacaacctagaacggaagtgaaatttgcaattggtttgattttagcaggtttgtcttttgtcttgttgatgttcccaagtatgctgttcggagtcaatcaacgggtaagcccattgtggctagtctttagtttctttatcatgattgctggcgaaatgtgtctgtcaccagttggattgtctgtaacgaccaaattagcaccaaaagccttcgaagcgcaaactcttgctatttggctattagcagatgcttcttcgcaagcgatcaatgctcaaattgctcgtttctatacaccgcaaacagaaggggcttattatggcattgtcggtggtgttgcagtagtcgtagggattattctttacatggcaagaaaaccgattcgtaagctgattgggaatattcactaatcaacggacttgatcttgaaaaagatcaagtctttttttgcacttttagtcaatttatgagaaaataaatgggaacatatgttccgtaggaggggttaaatgcacacgcgacgctataaaacgattctttcaccaaacaatacaatgaatctctatcgagggtgtacacatgactgtatttattgtgatagtcgcagcagctgctatcagatggcgcatcggtttgaagatatcgagatcaaagaagcagcaataacgattttggaccagcaattaaagaagcgccgacagccttgcatgatcgttaccggtgctatgtcagatccttacgttcatgcagaacagcgtttgagacaaacgaggcaagcactggaagtaatcaaaaagaacggttttggtgtcgcgcttttgaccaaatcaacgcgtgtgttggaagatttggatttgctgatagaaatcaaccagcaaacgaaagcagttgttcaaatgactctgacgacttatgatgaagcactatgtaaaaaattagaacgacaagtcgctaccacttatcatcgttttttggcgcttaagaggtttcaagcagcagggattcctactgttgtttggttatcacctattcttccttttatcaatgacagcgaggagaatctgttgtgggttttggactactgtcgccaagcgggagtgaaaagcatcatctgttttggatttggggtgacgatgcgggaagaaaatcgcgcatacttttatcagcaactagaccgtgattttcctggtatgaaggaaaagtatcagcaagcttttggcgatcggtatgtttgcgacagtccgaatcagcaaaagctaatggctattttttgtgcattctgccaaacctatcaaatcctttatcgaccagaagaagtctttgcctatatccatcgttttgaagaccagcagttgacactcttttaattcgcgtcttttaaacaaatgaaatagccgcaaggactgagagtgttccagtgtacgagcaacacctcgtcaccctgtcacgaggtgtgccagttctcttatcctgcggctatttttatttgatttttctgatatgcgattccttatggtgaaaaaaacgaacgtggtcttcttaaagagcctgccagtcgatgggctgccgcatgacctgctggtcgcggatcaacagcatgtcttggaaagtttgttttagaaaatagcggtcatggctcacagcaattaacgtaccaccaaagcgctgaatcaattcttcaatttcttcacgagcatagatatccaaatgattggtaggctcatctaatagcaggacgttgatttttttatgaaaaagtttcagcagataaaggcgaatcttctcaccgccagaaagatcctgaatgcgttttgagacatcatcctgataaaaaccgatttgtgccagttgttgtcgtgcagattgttcattgcctatgaactgataggcaaaggataggacccgcatagcgggattagaaaatgagagcttttgaggcagatacccgatctgcagattactgccggatttgatcgttcccgcgtcaagcgccaaagtacctaacaaaagctgaatcaaggtcgtcttaccggtgccattttcaccaatgatcgctaagcgctcaccacggtaaatcgagaaactactgtcttcaaagagtagccgatcagccatgactttaccgatatttcgggcgataaagacttctctgcctgttcgatcactttgattgactgtgcgtatcctttttttaggaggcagcgggggcttaacgagagtgatcttcgctaaacgcttttcaatttctttggctttacggaaaaagtcctcattgtccccttcattcccccattggcgataacggcgaatcatcgctttaagccgctggcattctttttgctgcagctcatagttcttagtcagttctgcgattcgagcttgtttcaatgaacgatattggctatagtttcccggataagaaatcaattgaccatcttcgatctcacagatcctagtcgtcactttgtccagaaaagcgcggtcatgagagatgacgatatacgcttttttcgtattgataagatagttttccagccaatgaagactagctaaatcaagatgattcgtgggctcatccagtaaaagcaagtcatgctctgtcaacagcaatcttgctagttctactttgactcgctccccaccacttaacgcctgcaaagaagtttcttgcaactgcgctattcccaatcctcttaaactagcaagaatccggtcttctaacagatagccaccgagttcttcaaattgtagctgtaattgtccatagcggtccaataatttcgataagtcagcgtcaggatcgctcatctgttgttcacaacgtcgcatcttgcgacttatctcttgcagtcggggggaagaggtttgtaaatacgtcagcaccgtttctgaagagggcgaaaattcttgtgccaaatgaccaatagaaagacttttacgtcggctgatcgttccagtatcatttttctcggtcccgagtaataaatctaataatgttgtcttaccagagccattgatgccgattaaaccaatcttttcaccgggatcaatttggaaagttaattgttcaaatagcggggtaccgccaaaatttttactgattttatttgcttgaattagcatgatctcactccttgagaccactcaaaaaggccatggaaatccatggcctgcgttatttttatctgatgttgttcgagataaacaccttgagatggccattgattttacgaatattcaactgttttagacagactcgtccctaaaacggtttttgtaaaaccaattgcatggctaaatgcgatatggtaacgctgataattgacgttacatgttattttagtcatgcgcatcatggtgtttcctccttttgcttatttgccaatagtgtaccgcaagtgaccttactttgcaattagtcagttagttttttcttgactggaacaatttcagaaaggttacttgccttcggttgcccaatcactaatggaacggtctcatggaccacgtcactgtaagtgagtccaaaccaacgttccggagaaatagtatgccgtttgataaagagtttggttaacattacttgccgctcccatcgggttaatgaggtgacattcgacaactcttcttcgatcagaacaaactggaagtcgccaacttgacgtcccggggtcaatgagtatttttgcggctgttttggtaagcgaccatccttcatcaattcttgaatgatttgtcggatgtagacattgacttcttgagaaacccgaaaacctaagtagagtttcaattttacgatgaaatctgtctcagccatcgagacttcgtactgttttgtataaggttcatctgtgacttccacattcacaaaccaataaactttggcgcgtttcggccgtttatcaaggatcgaataaataaactgacggccaatcgtatttccttgcagtttaggaactaaaaagacgacattggtctgagaaaatggcaatgtctcatcattccgcaattcctgtagttggggaatgtattcggtcaagtcaacttcttcggcagcttgttcttgaatgtggttgccccattcccaaatgagcatgatggcgataatcaaagcggccatcaaaaccgcaacgaacccaccgtggaaaaattttgcggcactcgagatgaagaagatgccttcgatagctgcaaaaaataaggtaataaatggagcgataaatcgcgcttttttgaattgacgcaaaaagaaatataacaagactgtggtcatcagcatagttactgtaatcgctaaaccataagcggcctccattcgcgtggatgtccggaataagagaacgacaccggaacaagcgatccacagcatcaggttaagcgcggggatatacatttgtccgatggaagaaccaggatacatgatctgcatccgcggcaacaaacgcaacttgattgcttccgaaactaacgtgaaagatccggaaagtaaagcttgggaggcaatgattgcagccaacgcagaaaagccgacgccaaaaacggtccaaccttgaggcaaagcctggaaaaaagggtttaggttttcaatctgttgataggcaggatcttgataaacctttaataaccaagcagcttgacctaagtaattaagcatcaaacagattttgatgtaaggccagctggcataaatattctttttgcccacatgtcctaaatcggaatatagtgcttcagcaccagtggttgccagaaagatattcccgagaatgaacagacctgaggtgttatcagggctaaacagcagcccgatggcataacgaggatccaacgcacgaatgacagacagatcaccggaaaagttgatcaaaccgacgatccccaaaaaagtaaaccaaccaagcatgatcggtccaaatgctttcccaacgaattctgtcccaaagcgttgcaggctaaaaagaacgaaaaggatcgttaatgtaatccaaacaataatggattgatcattcccaaaatgatcataaaacatcggaatgccccgcaacccttcaatggctgtcgtgacagtgacggcaggagttagtacaccatctgccaataacgcagcgccaccaatgattgccggaatgatcaagtagcggctttgcttacgaacaagtgtgtataaggaaaaaattccgccctcaccgtgattatccgcgttcaaagcgattaagacgtacttaatcgtggtaagcagagtcagagtccaaaaaacgagggagacacttcccaatacaaagtccggggagagtgttttcaacccgccgttgtcttcaacgattgctttcatcacatagagtgggctggtcccgatatctccatagaccacacccatggcgaccaaaaggcctcccgcggttaattttttcattttactcatagattttccctccaaattgaactgcaaaaaagacccaagaggccctttgccacttaggtcttgcaagaaacatcatagaccagcggattcccgcttgctgttgatctatgatcatggaaaaacccatgtgctactcccctaaattgctataattatctttgttttgctgattcctgtcaacttttttcatttaaaatgtaaataaacattttaaattttatgtttattcacgtaaaattacgttaagtcttatttctaagggggatagtaaatgattgaattgaaacatgtaagtaaaacgtacggaacaaaaaaagcattgaaggacctttctttgacgattcagcaaggtgagatctttggttttttaggacataatggtgcgggaaaatcaacgaccatcaagagtctagttagtattttacagccgacgagtggcgaaatcgtttttgatggcaaagcattagcccaataccgagaagaaataaaaaaacagattgcttatgtcccggattcaccggacatgtttttgcagttgaccgccggagaatattgggatttgatcgcagctgcttatgaagtaccggaaacccaaaaaaaggtacgcttaaatgaactgggacagttatttgatatgacgacgcatgcagaagaaacgctagccagtttttcccatggtatgcggcaaaaaaccattctaattggagcattactgccggatccggatatttggatcttagatgagcctttgcagggattagacccgcaggcagcgtttgatctaaaagaaatgatgaaagcacatgctgcgaaaggcaaaacggttattttctcgacgcatgtcttggatactgcccaacagctttgtgatcagttagctattttgaaaaaaggcgaattgctttataacggttctgtcgatgaattgcttgcacaaaatccagatctttctttggaagcgatctatttaaaaatgacaggtagaggcgcggaagagccatcgttgacagaaaatggaggcgagttcagatgaacaagcgacagttattgacgttgacaagcgtcaatcttcggtacgccaatccgcaagtcacagataaagcccgtaaaaaaggaaaaagcgggacacaattgactcgttatttgatccaacaatatgtattatcaggtttcgtttttttagtgatttacggtctaacaatgatcgcactggatttcagccgtttgccaggttttttcacttattatgttgctctttttggcgttctaggattttctcaaggaatctcgtccatttttaatgtcttctttgagagtcaagacttgcctgcatatttgccattgcctttccggcaagcagaaattttcaccgccaagattcttgttgtctttttaacagtggcaccatttgtttttccgttatttgtcttatttcttttaacaggaatgcgttcacaggtctttattctgctcacgcttttgttagcgattgtgctctttttattatttctcgtgattgtttttagtatttgtagtttgatcgtttttggattagctcgaacaaaattgtttcgtgaacataaaaaaatgatgaccagcttgttgttgggaatttctatgatcgtagtagtggtagggatcttgatgatgaatcaaaccagttcctacgatacacagatcatggatcgcggggccattgcctttttactgccatttttctatatcatgcacagtccctttgcagttgcaggaatcgggagctttgctattgttctagtggtttgtttgttgctgctaggagcgattcggttctttattttaccgaagttttatgatcagatggcgatggctgtgcccgaccatggaagcgtgcgacggaagcagaaatccgggcaaggattgtcgcagatgttattcagttataattcccagctggttcgtgatcccaacttgattatgcaagtattgtccacttcactgatgacaccgatcatttttattgtgacatttgcattgagcggtacgtttgatctaggacaaatggatgctcgtttttgtggagtgttctttttggcaggtatcgcattagctgtgatgatggtcaatccaacctcttttatcagtaccttgatttcattggatcagcaaaattttctgtttgttcgttcattgccgttgtctatgaaaaaatatttacaagcaaaattccgatttggcctaatgcttcaaatggttttgactggcgggattgccttattggcgattttgctctttaagatgccgatcctattggcaacgactttctttctaggtacgttacttggttgttacttgctatgcttaaaatattttgcccgtgattatcgcttgcttttgcttgattggaccaatgtcagtcaattgtttacccggggtgccggaagtgtgggaatgatcgtcggtatgatggtggcacttctccttagtattctgttactcgtcggttacggttttgcagcaacgatgattccattttggctcttgaatggtccagtcttgctagttctgttaattggtagcgtgctatggcacaactactatcaaagaaaattttggcagttgattcactgagtctagtcgtcatcaatagcgcatagaaaaagaaatagatttaatcagaaaattcagaaaaaagactttacaagtattcagaaacatgattagataataaataacctattactttgctttcattttttgctggcaagcttgctccacaggcttgttgcaagagactgtgccaaacgtcatactgattagaaggaaccagaagttgtccgcttcaagaaagacagctgggtcattttgagctgagacggatggcgcagtttttttaatggctaaaactaacaaatcgtgaaaaatagaaaaaaacactctgacaagaacctttttgtcagagtgtttttgtttttgatttgagtatgtgttggttcattcagagattatgcttcctctttttcgttggttgttggcagatgattgtcaaggtctgtccgtacgaccaatacgtcacaagaggcatgacggattacatactcagagactgaaccaataaaaattcgttcgacggcattgagaccagtagcgccgatcatgattaaatcgatttgattatcttctggtaattgtttcgcaatgattggttttggcgaaccgtattcgatgacagtctttactgcagttacttggttcttacgggcatagtcttcataatctttcaatgtttgcttagccatttcagtcgcttgctcagccaacatgccatcaaaggaagaaacagtttgaaaggcacgggtatcgattacatgggctagtaccagttcagaattgttccgttgggccacattgaccgcttttttaaaagctaattctgactcacttgagccatcgactgcaaccatgattcgttgatattgttgtaacatatgaaacactcctctcagataacttcatctttattgtaaaactttttgactaaaaagaaaaacctaattatctgtttttttcatcttacgggcaaacagcaaactgaatgaggcagaagtaatcattaacactgctaaataaacgagggcaatcaattttttgtctaaaaaagccacgatgattgcaagaatacctaaaacaccatgaagatagccataaatggtcaaaaaagtttgatttttagtattttcaggaataagggaaaagaaaatggcatgttttgttaacagtaagtagcagacgccaaacaacaaaacagcagcaatcaaaaataatagaaaaatcatccgtgaaatccgtccttctcttataagatagttttagtatagcgaagtgctaaaggaatagcaaaaagcacaaaaaagccatctgtctaaaacagatggcacattcaataaagaatgggtaatatccgtagatgccgttctttttcccgtagtattgatcccgcaaattctagcaggtgggttccacggtctaagcatcgaactaccaaatgaaaaggcatgttaccagctttgacacaagacggatcccaatatatcaataaaaatgttcggtcaacacacagatgggacaactcgtacatcacagaattcccaccttcatagtagcataggacaacaaaagtagcaataaagaagattgaaaacggtgacagaaacctttttcgcttccatgaagcggctgccgagggttaggtctgtttttttcgttgctgcaattgttgatatctttgacctagagcttgctcgtattttccggtagcctttggctgataatagtgagcttgcttgattttatcgggtaagtattgctgatcgacccacgcatcatcaaagttgtgcgggtattgataaccgacgcctcggttcaaggcttcagctcttttgtaatgactgtctcttagatgatcagggacatccccggcattgcctgcacgaatatctgcgatggcagcgtctagtgccatataagccgagttggacttaggggatagacaaaggtcgaccacagtatctgctaaagggatcctcgcctcaggtaagcctaatcgttccgctgctaagacagcattgactgttcgagcagctgccgctggattggccaacccgatatcttcataaccgatcaccatcaaacgccggcagatgattgccaagtctcctgcttctaccagacgacccagataatggagtgccgcatcaacatcactgccgcggatcgatttttgaaaagcagagatgacatcataatgggcatcgccatctttgtcatgggtcaatgctttgcgctgaacacactcttcaataattggcaaagtcaaatggattttcccatcagaacttggcggcgtggagcgagcagcgagttctaatccattgagtgcactgcggagatccccattggtcgctcgtgaaagatggagacgagcttcttctgtcaactggatcgattctgttcccaagccacgttctttatcagctaaagccgcatcaatggcggctaaaatatctgattcttgcaatggttttacttcaaaaatctgtgtacgactacggatggctgggttgatagtgatataaggattttcagttgtggccccgatcataatgatttttccgctttctaaatgaggcagtaagaaatcttgctttgttttatccagacgatggacttcatccaaaagtaaaatgactgtgccgctcattttggcttcttcggcgacgatttgaaggtcttttttcgtatcagtcgcagcattcagcatgcggaatgcgtaacgtgtcgaaccggcgattgcactagcgatacttgtttttccggtccctggtggaccatacaggatcatggaagagagcatcttggtctcaaccatccggcgaatgatctttccgggtccaactaaatgctgttgacctacgacttcatcaaggttgcggggacgcatgcggtacgcaagtggttgctgcataataagctcctttcttttttctttagtatatcataagaacgtatattcccataaggaagcgggtattttgctattgaaactagtcagtggcgatagaaaggtcaaacaattgataagatggtcgtaatcaatagtaagttccttgagaattgtgtaaaataaagaaggtgaagaaaatgaatgaaattgaacaattatttgcacaacaatcaacaacagcgattgcccggcaattattagggatgtatctggaacatgagacgcccagtgggaaattaggcggttatatcgtcgactgtgaagcttatttaggaccagaagatctggctgctcatagtttcgggatgcgtaacacgccacgagttcgagcaatgtatgaaaagccgggaacgatttatttatatacgatgcatactcatttgattttgaattttatcacacagcctgaaggcattccccaagggatcatgatccgcggcgtggagcccgtcgaaggaatcgcacaaatggagataaatcgcagtaaatccggtcctgatctctcgaacggacctggaaagctcgtgaaagctttgggaattacgcctgattattatggccattcaatttttacaagtccactgcatcttgtcaacgagaaacggcgaacaccgaaagaaatactcgctgttcccagaatcggtatcccgaataaaggggagtggacccataagccgctgcggtttgtcgtagcaggtaatccatatattaccaacagcagaaaatctgctgtccagccagatcacggctggcaataggaaagaaggaacgtataatggctaaagaaacaatgctgacttatttggacagacaattaacaaaaaaaatccctgagtacgatgttgcccttgattgggatgcaagaaaccataccatcgaacttgttttacgcttatttgcagagaacccgaatcatttgcaggtagatgatgcccaaggagtagcctctgaagaagagatcatcgaatttgaagacggtattttattgtttgatccccaaaagtcttcctttgcagaagaggactttttggcagtcattccctacgcaggcaaaaaaggaatccaaaaagcgttgctggatgctttggttgattacatcaaagagattctgacggagggagaaagtgatttactagattttctaaacgatgagagtgaagaagcggtcttcgaactagttttcgatcaagatcagttgttagaccgtatgaatacttaccaagaaagcgatggggaatcgtatattccttatccaagttattaaggagcagatagatgaaatggaatgaagtgaaagtagctactgcaagtgaagcagttgaagcggtcgccaacattttgatggaacaaggggccagtggtgtagcaatcgaagatgttcttgacattgaaaactttaaaagcgatgcctatggtgaagtgttagacaaagaaacctatacaacgctggatgaaggcgcccaggtaacggcttatttccccgagactatctttttacctgaaattttgccatttattgaggcggcgatcgctcgtttaccggaatatgggttagcaattggcaaaaatgagattacctccagcgaagtagtagaggaagagtgggcgactgcttggaagaaatattatcatccagtacggatcactcgttatttgacgattgtacccagctgggaacaatatgaaacgacggaccctgccgagaaaatcattacgctagatccaggaatggctttcggaactggtacccatccgacgacgcgcttgacgttacaggcgttagaaatgtatttacgaggcgaggaaacggtcctggatgttggaaccggatcaggggttttaagtattgccagccgccacttaggggccaatcaagtatatgcctatgaccttgacgaggtggctgttcgggcggcaaaagaaaatatggcactaaacccagttgccgaagcagtgaatgttgctgccaatgaccttttaacaggtattgaaatcgaagcagacattattgtagcgaatattttagctgatatcatcttactgatgatcccagatgcttggcggttgctgaagcctaccggaacattaattgtttctggaatcatcgaagcgaaaaaacaacttgtgatcgatgccatgacagagcaaggatttgttgttgaccaaatcttgaatcaaaaagattggtatgcgatcgcactaaaaaaaccagagtagggaatgtcatatgcagcgatattttttgaatgaggattatgaggcgaagcctgtttatgtagtagagggagaaccgtttcatcacatggtacgtgtgatgcggatggttccggatgattgtgtctacttggtctttcaagaccaagtagcgatcctcgcgaaaatccagcagatcgatgaacaagcggttcatttgattgaagtagaaaaggaacagcaagacaaagaattaccgattcatgttacgatcgccagcgggtatcctaaaggagataaattggaattgatcgtccaaaaagggacagaattgggtgccgctaaatttatcggttttcccgcccaatcctcggtagttaagtgggaccataagaaactccaaaagaaacagcagcggctgcaaaaaattgcccaagaggctgctgaacaagcgcagcggcaacgagtaccgatcatccaactggctgcttcggacaaagagttgtgggatagtctttcaaactatgactatgtgatcgttgcttatgaggaatctgctaaaagcggcgagaatgccaaactgatcgatattttgtccaaagcagcgcccggcagcaaaatcttagcaattttcggacccgaaggtgggctgacacctgctgaaatcactcgtgctgaatctcaaggtgctgtgatctgtgggttagggccacgtattttgcgaaccgaaaccgccccattttattttttgagtgctgtcagcgtactaactgaattagtaaggaagtgatcaagtgacgcaattcaaagacaagcttagttttcgatttttacaagctggactgacggattggttgttaaaagatacgtttactgaatttaacacacttggtgtccaagaagtcatcgtgttgcctagtgatttgcgcagagcgaagcagttaactgaaggctccgagatccaagtcggctgtgcagttgattttcccttggcacaaggaacaatcgctaagaaagcttttgagatcggtcattcctttatggatggcgctgattttttagaagtctggctaccagcggctttgttggtggaaaaagagcggacggctgatctggcggagttaatggagacaagccggtcactggctttgtctggtggtgagatccgctgggctgtcaatacttcacttatgaatgagttgacaaagatccaagtagcacagcgtttgaaagcatgggactggcctagtattactcttggtcagcagttaactgtttcagatgcgttgcatgatgtctcgatttttgctttagatggaggaccgcaactgacgatccaagtcaacacggcagcgtctgttacggatcagaaatcacttgcagaacttttacaggcaggggcggcaaaaatcggcgtgccctttacagagtcagcgttactgttgaatgaataaaccggtattttgtctcgcttgaccagaatagagagaattgaaaaaaacaagaaaaatttgtataatgacactaatcataaaagaagatggccaggcagaagcgcattgcttcaagagttctgctattcagagagttggggatagcagaattctttagaagcggcttctgtcttgctttttgaaaataggaaaaaaggaggcgcgtttcatggcaaaagaagtgatattatccggacctggtgtgatcaagctcgtggcccattatatgagtgaagaacatgttgcatttgtacagaaagctttagattatgcgacagaagcccacaaagatcagtttcgcaagtccggcgagccttacatcatccatcctattcaagtagcagggattttagcggaactacaaatggatcctcatacagtcgccactggttttttacatgatgtggtagaagatacggaagtgaccctagcagatctaaaagaagtctttggtgcagatgtagcgatgctggtcgatggtgtgacaaaattagggaaaatcaaatacaaatcccatgaagaacagctagcagagaatcatcgcaaaatgctgatcgcgatggctcaagatttgcgcgtgatcatggtcaaattagcggaccgcttacataatatgcgtacattgaaacacctgcgggaagacaaacaacggcgaatcgcccaagaaacgatggagatttatgcaccattggcgcatcgtttagggatcagccgtatcaagtgggagctagaagatatttcactacgttatttgaatccacaacaatattatcggatcgttcacttgatgcaaaccaagcgggaagaacgggaagcttatgtgtcggaaaccgttgaacagattcgacttgcaactgaagaactagatatttttgctgagatctatggtcgtccgaaacatatctactccatttaccgcaaaatgaaagaccagaagaaacaattcaatgaaatctatgatcttttggctattcgggtaatcgttgattcaatcaaagattgttatgctgttttaggaacgatccacacaaaatggaaaccaatgccaggtcgatttaaagattacattgcgatgcctaaagcgaatatgtatcagtcactacatacgacagtgatcggtcccaaaggcaatccagtagaaatccagattcgtacccatgagatgcatgagattgctgaattcggggttgctgctcactgggcatataaagagggtagaaccgagaaagtcaaagcagacaaaatgacccagcaagtcggttggttccgcgaaattttggaactccaggatgaaagctacgatgcttctgaatttatggaaggtgtcaaaggggacattttcagtgacaaagtatatgtattcacaccgaaaggcgatgtcacagaattgcctcaaggttcaagtccgctggattttgcctacagtattcataccgatatcgggaacaaaaccactggtgcaaaagtgaatggcaagatggtccagttggattacaaattgaaaaatggcgatatcattgaaattttgacatcaccaaattcattcggaccaagccgcgactggatcaagcttgtagctaccagcaaagctaaaaacaagatcaaacgttttttcaaggcccaagatcgtgacgaaaacatcatcaaagggcacgaagcagtggtcaaaacattgcaagacatgggctttgtaccaaaagaatttttaacgaaaagcaagatggcagaagcctgcgaacgatttaattatcaaacagaagatgatttatttgcttctgtcggttttggcgaagtgagtccaactacactggccaatcgtttgacggaagaagaacgccgtgagaagcagatcgaaaaacaaaaacaacaagtacaagacatgatcaatcagccagcgaagaaagaaccagagaaaatgaaagtccgccatgaaggcgggatcgtgatcgaaggcgtggacaacttactgatccgaatctctcgttgctgtaatccagttcctggtgatgccattgtcgggtatatcacgaagggccgcggcatctcgatccatcgcagtgactgtccgaatgtccaaagcaaagagatcgtcaatcgtctaatcgatgtcgagtgggaagatacttctaacagcggcaaagaatacgatgcagatctggaaatctatggttatgatcgttccggattgttgaatgatgtcttgcaaacagtcaacgctgttactaaacgattggtcagtgtggaagcgaaaaccaacaaagacaagatggccaccattagaatcacggtctcaattcagaacctaacacatcttaagtcaattgtggacaaaatcaaacaaatcccagaagtatatagtgtcagaagaacaaaggggtgagacgcgagacatgcgagcagtcattcaacgtgtaagtgaagccagtgttgcaatcgatggaactactgtaggagcaatccaaaaaggttttttagttctcttgggaatcactcatgaagatagccaagaagatgtggattacttggttcgaaaaatcaaaaatttgcgggtgtttgaagatgaagcgggaaaaatgaatcaatcgattgaagcaatcgaaggtgctattttgagtatctcgcaattcacattgtatggcgagaccaaaaaaggaaaccgtccaagctttattcaagctgccagacctgaagtggctacaccattgtacgaagctttcaatgcgggtctgcacgctgcaggtatcgaagtggctacgggtcgctttggcgcagacatgcaagtgtcattaatcaatgacggtcctgtaacgatcctgatcgatacgaaggaaaaataggctgcgttcacaacgactgcctatccaacatgccaaaagaaccaaagcaaatagtttaaagaggactgccaacatgcaagttggtagtctttttttagtggaaataagtccatcttgtagcacttctggtaccaacccttttgtctttggactatcttacaaaactgtaagatagttctttctgatcagaaatagttatttaagagctgaatctattccttttcgtaatggtagcagttacaaaaaagttatttatttttatccatccctaaaaaactttcaataaattagattgtccttaaagcgcaaatgtgaaataatagttaaaaaataatgtcactggaggaaatgacaatgaatttttggcagcgtgcattaaaaagtgttactcgcaggaaagggaagtcgtttattttatttttagtcatctttattttaggtaacgtgatcgcaggtgcggtagctgtgcagcagtctactatgaatgtggaacgggaaacgaaaaagaaaatgggcaacgttgctacagtcgagtttgattatgagcagtttgagaaagacaattcaggaaaatcagatgaggaagtttattctgaagaaaatagtccgaaaacgccaaaaacggcggactatgacaaagtgggagaattagattacgtcaaatattacgactataccatgatgggttggttagagaccaagaaattcaaagcctatacaccagaagatgaatcttttggcatggcgggcggcaattattttaatttaaagggcggcaatcgaccacagccattagatatggaagaaggcaacatcaagctgatcgatggagaagtgtttagtgaaaaagacttgtcagaaaccactaactcgattttgattagtaaagaagtcgctgaaaaaaataatttgtcggttggcgatcaatttgtttgggatatgtatagtgaagtccctcaagatccgatgggtgacagtgatgatagtacggctacttcagatgatgaagatgcagagagtgaaagtgcagaaatccaaacaaaagttgtcacagctgattatcctgtcaaaattgcagggatttttagtgtagttaaaaaggaatcggccaatagtaatccttcgcaagaagaaaaatccaatcaaatctggcaagctgttgaacagatcaatacgatttatgctgccaatcagttggtgaaagattttagtaaattccaaaacgaaaaattgtggggagatacggtaatggccgaagatacggaggccgaaccggaagagtattatcaagcgatgtatgttttgaactctaccgacgatgttgaagcattcaaacaagaagccaatccattattaccagattactatcatgtggtagcttccacagatcaatacgatcagattgccggaggaatgaatcgtctgggaacgatttcccgctatatcgtgattgttgctgctattgctacggtctttatcatttcattagtcgttctattgtttttgcgagaccgcaagcaggaattagggatctatctatctttaggagaaggccgtgggaaagtgattgggcaaatcgttattgaagtggtgctcgtcagcttagtcgctctaatctgctcattggtgacgggaaatctattaggaagtgcggtttctcaaacattgatgcaaagtgactggatgacgaatctgtcccaaacggatacctattccatttcaagcacaatgatgacaaatactctcagctatgcggatgtccaaagtgcttataaagtcactttttctatggggtatgtcatcacctatcttttattgggattaggtacagtcttattgtctgcaatcttgccgttgttgtatattctacggctgaatccaaagaaaatcatgatgtagggggaagaaaaaatggctttgttggaaacaaaagaagtagattactattatcaagatggcgatcagcggcgctatattttgaaagaaacatcggtggcgtttgaaaaaggcaagttttatgccatttcaggacagtcagggtcaggaaaaaccacatttctctctttgatcagtgcgttggatacacctaaaagtggcgctgttttctttaatggagaagatattcaaaaaatcggacatgagaaatatcgccgagacgatatcagtatcatctttcaaagttacaatttgattccttacctgtctgcggtagaaaatgttctagtcccaatgtcgatcacggataatcaattgccggagaaccagcgggaagtcgcatacaatttattggactatattgggatcacgaaagaaaaagcagatcgtttagtcaatcagttgtctggtggggaacagcaacgggtggcaatagctcgtgcactggcgacgaatgttgatattattttggcagacgaaccaacgggtaatttagatgaagaaatggaacaggaaatcatcgatatttttaaagatttggctcatatgcataacaaatgtgtgattgttgtgacccatgcgaatgaaatcgcccaacaagcagacgaagtactctatttgcgtaaaggtgtgttgaataaagatgagtgattttttatcaaatttcagtcctggtaattacgatggcaagaaacaaagctctcctaaagaaactgagtttgacgaaaaaacagagcgtaaagcagaaccaattccagattctcagacatctgatcagggcgcaggagagagtaaagctgcagcagcatcggatccgaaggaaatgaagcgaagaacgcgcaaggaaactagctcttctcaaccggtcagtcggttcggaaaagaagagacagagtttgatccaacttatcgcaagcggcagcgtaaaaaatacgcgctgatcgctggtgctgtcattgtgctgattgccatcagcagtgtggtgtattatcaattgactcatgtgaaggttcctgattttgctaagaaagatttatccgaagcccgaacatggggcatggaagaaggcgtggcgatcaaagtcgatcaagtgtatgattttgaggtagagaccaatcgaatcgttagtcaaagtgttgctgcagatcagaagatcaaaaaaggcaagactttgacagtcaaagcaagcctaggtcctgacccagaagaaatgatcgagctgcccgacttttcgtcactgactaccgaagcggcaaaagaatggatcgagaaacaaaaggcagaaaatatctcgttgatcgaacagtatgacgacaaagtcgaagcaggtgtattcatcaaacaagaagcagcaaataaagagcaagatctcaaagcttataagcgcaaagatcgcttaagcatctattattcaaaaggaaaagaagtcttcgagaagaacatcgaagttactgattttacagggaaaaacaaaggtgaagctcaagagtgggctaagaaaaatgaattgaagtacaaagaagaagctgttttttctgatacagttgctctagacgtcgtggtttcccaagaaccagtcaaaggcagcaaattggccaaaaaggatcaatttcttgtcaaagtttctaaagggaaagcattagttgttcctgatttctcacagtataccatcgagcaggcagaggggctagaatcgaagataccgattcaagtcaagacagtttattctgatcaaatcggttatggcaatttcatcagtcagtcggaagaggcgggcaaagaatatagtgacagcgatacattgccaacagtgaaagtggtttattcactggggcaaccgtatttgaaggatatccggcaccaagcaacggaaggcgatctgccaaaaatgttctttgatgagtacaaatcgaaaggtgcttctgtatattatgatgtctactatgtagattcagcagaaccaaaaggaacagttgtggagatgagtcgttatggtgaatttattccattggaagtatcgatcaccatcgggattagtcgcggaaatctgcaaggcgagaccgaatcattaccggtcagtcctgagacagaaaatgtaaaggatccgctagaaacagtcaacagtgccactaccgaatgagacatttagcaatcgggcccgtaacaaagctacagaacccaagcaataagtgagtgaactatctaaatgaagtgtgtcttctgtttgtcgacaatgacagactgaaacagaaggatctacctgcatttagatagtttttctttttttttacttggattttgaaaaatggagagagtttttttgttatcaagtaatcacaggttttcaagcatgcatgcttgaaaaccttttatcgatacggtacagttgaattgataaccagtcaataagcagtattttacatagagaagggacgaaagaaatgatcaaaaaattactagcaaatgttggcgattataaaaaagccagcctattgacaccggtctatgttgccggcgaagtggcgctagatgtcattatgccactgatcatggcaatgatgatcgaccaaggaattgaaaaaggacacgcgggcgtcattttgcgctatggcggtctgctttttttgtgctcattattggcactgatgctaggaactttaggaggacgaacagctgcgattgcttctgccggttttgctcgaaatcttcgccacaatctttttagcaagattcaggatttttctttttccaatatcgaccgtttttcttcctctagtttgatcacgagaatgaccaccgatgtgactaatgtgcaaaatgcttaccaaatgattatccgaatcttggtgcgcagtccattgattctggttttctcactgatcatggttagcacgatcagtccagaattgatgctggtttacctagtcgtcttgccaattctagccatcggacttgctttagtgattcgctttgctcatccgcttttcttgaaagtatttcggatctatgaccgtttgaacaacgtagtccaagaaaatcttcaaggaatccgtgtggtcaagtcctacgtcagagaagagcagcaagaagaactttttgacgaggtgtcaaatgatgtctaccgcaactttacgctagcacaacgaatcgtctcgttcaatatgcctttgatgcaattctcgatctatagctgtatgttgctgttgtcttggttcggtgcccaactgatcgttgagcacagcagcttgacgacaggggaactggttagcatgttcaactatactatgcagatcttgatgagtttgatgatgatgtcaatggcatttgttcagattctgattgctcgtacttccgcacagcgggtggtggaagttttggatgaagaaagcgacttgaaaaatccggcatcgccattgacagaagtcaaagatggttcaattgtctttgaaaatgcttgtttcagttacgcaaatgatcaaacgagattggcattggaaaatgtcaacttacgaattgaatccggagaggtaatcgggatcatcggcggaaccggaagtgcaaaatcaacgctggtccaattgatcccccgtttgtacgatgtcattgacggtcgtgttctcgttgggggacaagatgttcgcgcctatgatttggcagcattgagggatcaagtcagtatggttttgcaaaacaatgtcctttttagcgggacgatcagtgagaatcttcgctggggaaacgcggaagcaacggatgaagagattcagcgggtagcaaaaattgcccaagcggatccttttatccaagaatttcctgataaatatgacacattgatctctcaaggaggaaataatgtctccggtggacaaaagcagcggttaacgatcgcgcgagcgctgttaaaaagaccgaaaattctgattctggatgactctactagcgctgttgatacaaagacagaccgtagtattcgagcaggattgaaacaagaaatcccgggaacgacaacgatcatcatttcccaaaggatcaattcgatcgaagatgccgatcgaatcattgtgatggatgatgggaaaatcaacggaatcggaacccatgaagaattattaactagcaatgaaatttatcgtgaagtctacgactcgcagcagaaaggatttggtgaaggtgaagaatagacaagcagcaaatccccagagaaccttgaaacggctgctggcgaccatgtttggcgattacaaactgcagttgattatcgtattgttcatgatcttgttaagtgcttttgccaatgttcgcggctcactttttttgcaagtggtgatcgatgaccatatcactccgctgctgggacaaagcaatcctaacttcagcggactgctggcagctattattcagatggcaattatttatttaattgggatcattgctggtttgacttacaactttatgatggtcaaaatcagtgagggcactcagaaaaaaatccgcgatcagatgttcaaacatatgcaaaaattaccgattggttattttgatggccattctgatggtgatatgatgagtcatttcaccaacgatacggatacattacggcaaatgatttctcaaagtattcccaatttgatgatggctgccgtcacattttgctcggttttcattgcgatgttttccattagtatcccattgacttgctttgtactggtttcggtcattttgatgctgaatgtgattcggatcatctcccgcaaaagcggccgcttctttggcgcacaacaacgggatctaggcgcagtcaatggctatattgaagaaatgatgcatggacagaaagttgtcaagatctttaaccatgaacacgttgtcatgcaggaatttgatgctttgaatgaccagttgcaatccagtgctacaaaggccaatgtcaatgccaatacattgatgccgatcatgatgaacttgctgaatgttcaatacgtgctgatcgcaattatcggcgggctctttgccatcaatggtgtctcgggactaaccgtagggatgattgcttctttcttacagcttagccgttcgctgaatggaccgatcagccaaatttcacagcagatcaactttgtgatcatggctttggcaggtgcagaacgtatttttcatttgttggatgagaccccagagattgatacagggtatgtcacgctagtcaatgccaaatgggaatctggccatttagtggaaacaacaaatcgtacaggactctgggcttggaaacatcctcacgaagatggaactgttacgtacacagaattgactggagatgttcgttttgaagcagttgattttgggtatgtggatcatcaaatggttctgcatgacatcaatctttttgctgaaccgggacagaaagttgcttttgtgggagcaacgggagccggtaagacgaccatcactaacttgatcaatcgtttttacaatattcaagagggaaagatccgttatgatggcatcaatattcaaaagatccaactagaatctctgcggcgctcattagggatcgtcttgcaagatacacatttattcacaggaacgattcgagaaaatattcgttttggtaaactggatgccacggatgaggaagtagaagcggcagcaaaactggcgaatgcggatatgttcatcaatcatttacctgagaagtacgataccgtaatcacgggggatggcgaagggctgtcgcaaggacagcgacagctactagcaattgccagagcggcgatcgccgatccgcctgttatgattttagatgaagcgacttccagcattgatacgcgaacagagcggatcgtccagtctggaatggaccggctgatgcaaggtcggacagttttcgtgatcgctcaccgtctttcgacgattcagaattcagatgtgatcatggtgatggatcatggtcgaatcattgaacgaggtactcatgatacgttattagcagagaaggggacctattaccaactgtatacaggaaaaattgagttagactgattttttcccaggaaacgaagaccggatttaagggtcttcgttttttttcttgctgctgtgctatactaaagaaaaactatgaggagtaagtggatagataggaggaaataggatgcatttaacggtttcacagatccaattgaatgaggaaatgtatgaactgggtgtcactgatcagggggctgcttattttggtcgtttagcagaacatgcagagttggctctttttttcccatatgcagaaattcgtgaatgttctcagacaccagaaaggtttgcaaagccgctgaaagcctatttcgccggggagccagtagccttcgattttccttttgactttgtcggtacaccgttccaacaaactgtttggcaagcgttaactgaagtcccttatggaacgactgtcagctatagtgaattagcggtgagaatccaacgtcctagtgccgtccgagcggttgccaatgctgtcggacgcaatccgatgatgattattgtcccttgccatcgtgtcctgggaaaaaatggtcgattgactggttatcggggaggtttgccgatcaagcggaaattattacagctggaagggattcctttcaaggactgagcgcattttttctgcaaaaatttactaggtcttcttctcgaatttagtgcttcataaattgtttgtttaaaagtaaaaaatactaaaaaggcgtttctttttatgctacctttgatataatggagttgtttccgtttacaaaaaaggagtggagaagatgaagcgaatgaagttgcaaaatggttcagatatccgtggaatcgcgctttcgacagcagatcttacagcggatttaacagaagatgcagtgaaagaaattgcttcaggtctgcggacctggttgctgcagcgatatacggaacccttaaaagtggcagttggtcgtgatagtcgtttaagtggtgaaacgctgcagcaggcgtttatgaaccaattgcgaatagaagggattacggttattgattgtgggctggctacaacacccgcgctatttatgagtacccagtttgctgattttgattgtgatgccggtgtgatgctgacagccagtcatttgccctattactttaatggaatcaagatttttagtaaatctggtggtgcagaaaaagaagatatctcgtttatcttagcacatcctgaagctcatccggctgaccaactcggcgagtattaccaacgagacttacttactccctatgcagcagatatggtgacgaaaattcgtcatgggatgcagacagaagaagaacagccattggctggaatgaaaatcattgtggatgctggaaatggcgcaggtggtttttttgcagagcaagttttagtgccgttaggggcagatacgaatggttcacagtttctggagccagatggacacttccctaaccacattcctaatccggataataaagaagcgatggctagtattatggaagccgttttacgagaacaagcagacttgggaatcatctttgacaccgatgtcgatcgatccgctgtggtgaccaaaagtggacagccgctgaaccgcaacaacatgattgctgttttaagtaaaatcgtcttatccgaacatccggctgcgagtattgtcacgaattccccgacctccactcatctaaagacatttattgaatcgctaggtggtcatcaagtgcgttatatttccgggtatcgcaatgtcatcaacaaagcgatcgcccttaacgaaaaaggcattaatgctcagttggcgattgaaactagtggacatgcagcattcaaggaaaactattttttagatgatggtgcatatgttattgcgaagatcttgatgttgctgccaacacttcgtgcgcaaaatatcagtttggaagacttgatcgcggcgctgaaacagccagttgaaacccaagaattgcgtttcaagatcaatgattcagattatcgcgcaaccggggagaaggttatcgcatcgctagcgcatcatctcccatcggggtggcagattgacaatgaaaatgaagaaggcatccgtatacaggtttctgcaccttatggacaagggtggtttttgttgcggttgagtttgcatgaaccattattggtcttgcagatcgaaaatgaccaacctggacatttgccggcgatcgtccgcgaaatcagtgaacgtttgctgccgtttgaagcgatcgaccagtctgcaatcaaacaatttttagaaaaataatgaatagagaatgaagggttaatgttggtatttattatgttagtgatcatggctgtcacttatggtgtgaatctttttctgatagcatacatgagaaaacgaccgcagatcgatgtggtagaacgattgtctatgttactgggcgtcaatatgagtgtcttgtttgtagatgggatcgttttatttgttggaaagttattattagaagcagcgatgattattgaatagacaaagaaactcttagagagtcagagaaaaggaacttttttatctggcggatttgagagtttttttagctttttttaaagctgggattatcattcgctttcgatttagatatttgttaaagtaaagaaaagaagtggaggggaatattcagatggcaaaaatcatggtagtagaagatgaagcagttattcgccagctgatcatcgaagaacttgaaaaatggcaattcgaaacatttggaacaactgattttcatcaggtttttgacgattttgaagagcaagaaccgcaattgattttgttggacatcaatttaccggtttttgacggctattattggtgccagaaaatcagagagacatcgaaagtaccgattatttttatatcaagccgtaatacgaatatggatatgatcatggcgatgaacatgggggcagatgatttcgtgacgaagccatttgagatcgatgtcttgattgcaaaaatcaatgcactgctgcgccgttcctataactatgtcgaaaacaacagcgaaacgctggttcacaatgggcttactttgaatatcgacaacagcagcatgcagatcaatgatgaagtaattgatttaagcaaaaatgagtatcgattgttatatatattgatgaagaatcacgggaagatccttagtcgagaaaagctgttgcgagcgctctgggatgatgaacgttttgttgacgacaatacattgactgtcaatatcaatcgcttgcgtcggaagattgagcaagccggtatggataattacatcgaaaccaaagttggacaagggtatattgtgccatgaacaaaccgatgtcattcattgccttcttaaaagaccgctggttacttctgattggttgggtgatttttttcttgctgatgattctagtgatgtggctgacacctgatttccccatcgactggggaactgttggctatctttttttgatggaatcagtcgttctactgctttttttgggcgttttttatattactaaacgtcgtttctggcaaaagctcacattccatgagtcagacagtgtcttacaaaactatattcatggtgcgcgttcatcagaggaagaactggttcaaaactatatcaatcatctgattcgcgaacaccaagacttgatgcagcaagtgataagcaatcaagaagagcaaaaggaatacattgattcttgggtccatgagattaaagtacctttggcagcgacgcgcttactgttaaattcgattgaatttgatattccagatgaaaagtatattttactggaaaacgaagtgaatcggatcaatgagtatgtggaacaagtgctgtatgtggcacgtttggacagtttttccaaagattaccttgttcaagaagtgtcattgaaagcgacgattcagccggttattcgcagtcaagccaacgtgttcattcagaagaatattcactatgcgattaaagggggagaccagcaagtattaactgacggcaaatggctgagttttatttttcggcaaatcctcagtaatgcattgaagtatactccggaaaatgggcgaatcattgtccaaatccaaaaagatgggcaaggaacgcgtctttcggtagaagattctggaatcggtattccggcagaagatctaaggcgagtctttgataagggatttactggtgagaatggtcggaagactgatatgcactcgacagggttagggctctatttagccaagaatctggccaaagaattaggaattgagttaacgatttcatcggttgtgggagaagggacaaccgtcacgctttacttccctctgctaagctactatcaagaaaatcgctaatgattttttgagaaataccatttagttcttgtctctataccgttttcactgatacactgaaccttgtgtgtcaaattgaatgataaggatggataagatgagtatagtatttgctttaataccgatgattgcctggggcagtatcggattggtcagtggaaaattaggtggggatgcgaatcaacagacattaggaatgacaattggtgcattccttttttcactgattgttttctttgtcactatgccgacgattgatggctggatcgtagtgattggtttgctgtcaggactttgctggtcagttggtcaaaatggtcaatttcatggaatgaaatatctgggcgtttcggtggggcttccgttatctactggtatgcaattgatcttaaatacaattgctggagcccttttttttggcgaatggacgcaatcacgagactatttgttgggaatcaccgcattgattttattagtaactggtgcctatttgaccgcacgacaagacggggaacaaatgcctgagacagaaaacaagatgttggattttcctagaggctttcgttcgttgatttcctcaacaattggctatggtgcttacacaatcattattacttgggcgggaattgacccattggcaataatcttgcctcagagtataggcatgctgattggcgctagtttctttgctctaagaaaaaccaaagtcaatcgggcggtctggaagaatacattatcaggattgttgtggggaataggaaatgtttgtatgttgataacagttcaacagatcggactggccgtgggtttctcgctgtcacagatggggattattatctctacactgggaggcatattcttattaggggagaaaaaaaccaaaaaagagttcaaatatgtggtttttggttgcttgcttgttatttttggtggtatccttctagggtatatgaaagctgcataagtagtgaaatttaggaggatttatggatttatttcgtaaaaaaactattgaagccagtcccgttagtcatttgaaaaaagatttgaaattgaaagacttgatcatgttgggtattggcgcaatcatcggcacaggtatttttgttgtgaccggcgcggcttctgctgtatatgcagggccagcattgatcttgtcatttgtcttagcggcttttgtcgttatcttatcagggctctcatttgcggagtttgcttcccgtatccctgtattaggcggtgcctattcgtatgtgtatgttgtatttggcgaatttgttgcatggctcgctggctggtttctgctatgcgagtttatgttggcagtatcttcggtggcctctggctggtccggttatgtccaagggttcttgacaagtatcggtgtgcatctgccaaaagcgctgactgctggctataatcctggcgaaggaacgtacattgatctgattgcaggattagtgatcatttttgtgacgatttgggtaagtcaagaagccaaaaaagccttgcgattgaacaatgctatggtttgggtcaaattcgggatcattgcgctttttatcttttttggggtattttttgtgaagccaagcaactggcagccgttcatgcctttcggattttcgggcgtctttaatggggcggcacttgttttctttgcttttttgggctttgatgcggtcgcaatggctgcggaagaagttgaaaatccgcaaaaagatgtgccccggggaattatcggttcaattgcgatcgctaccttattgtatatcgtggtcacgctgattttgactggaatcgttccctttaaagaattgaatgtcaatgatccggtagcttttgccatgcgatatatcgatcacggcttagttggttcggtgatttcggtgggtgccattttaacgctgctgacagtgacgatttccatgatgtactcattagcacgtttgctttatgctatcagtaaggatggcttgttgccaaaatcattgcaaaaaattaatcctaagcataagacaccgaaaaaagcgacttatgcagctggagtcgtcgccttcttttttgccgcagcttttccattgaatattttggcagaattaacgaatatcgtggcattggcctacttgatcttaatgtcgttggggatcatcaagctgcgtaaaatgatgggcatgcccaaaaaaggggaattcaaggtgccgcttgtgccagtcttgccattagtttctgttgctagctgtttgttcttgatgacgcgattgcagacagccacttggatcgtttttggtattacgatcgtcattggtttgctgatctattttatctatgggtaccgcaatagtgcattgaatgaagaaaaccagcaagagctttagtgtttgctaacgctcttgtttttgttcatgtcttggcaggaaaccaaaagtgatgacactgtaaaaaacgagcccctgagagattcccagaggctcgttcagctaatagaaaacagtattgcgtctgcctgaattatttgtttccagtcaagtccaacaagcgatctttgaggtcttcttccaagtgacccaattccacttcggccgctcggcgtttttcttttccttctttttggatacgcaatgtttcctgaattgtttcgacaagatcgttttgcgttttttgcagcgtttcgatatcaacgattcctcgttcgttttctttagctgtttcgatcgcagagaccttcagcatttcagagttcttacgtaagagatcattcgttgtttccgaaacttggcgttgtgcagtaaccgcatctttttgacgcaataaagtcagtgcgataacgacttggtttttccataaaggaatcgctgtattgacagatgcctgaatcttttctgctaatgcttggttggtattttgaatcaaacggatctgtggtgcttgttggatcgtgatctgacgggccaagcgcaagtcatgggtccgcttatctaagcgatccaaaaattgcgtatagtcattggcgatctgtacatccatctgatcattcgtttcttgtgcttttttcattgcttcaggaataatcgttgtttgtagttcttgcatttttaactcaccggcagcaatatagatattcaatgcatcgaagtaatctttgtttttttggtaaagctgttccaacatcaaattgtcttttaacagaccgtctttttctttgtctaatttaacagcgattttatcgatttgagcaccgattttttggtatttagcggtgatctcaaaaatcgattgtttgactttgccaaacatccgtttgaagagattgccttctcctgcacgtaattcatctggattagcttcttgcagacgatacatcaactctgtcaatgaatcaccgacaggtccgatatctgctgcttgcacatgattcagcatcgattgagagaattctcccagcttggtttgagcagctgcgccataggtaatgactgcttgttggtcggttggatcaatcttattcgctaactcttgtgcctgtgcttgtcgctcaggtggtaatttatcaattaagcgagaggctttttgttgttcttgcaaggcattgatctctgcctgctgggttgtcgtcaatgtatcgacaggggttgcaaatggattattcaatagatcatcaagagtatcgtttactggtttaacttgatttggtgtctccgtcattctaactcctcctaagtcttgtttcgaaaaaaatctagcctgggctagatttttttttggatcgcttcattcgaagatcgagcaaaggaatccatccctattcattatctcgttttatgctttgtttggcaatggataactcgatatcaagatcatctaaatcatctgccacaaactgctgataatctttagcgatcaacgaggccatttgttcaatgatttgagtgctttcttcgattttttcataggtttcacggcttttgatctcatgttcattgatctcaatgaatttgtctgtcaaatcaaccatgttcggcaaatgggtgtaaagaaaatgactcgccgaatgtaatttcgtcggttctttgaccaactctttgaacagtgctttcgaagcgcgtaatgcatcatgacgcaagtcgatcgcttttaatttattgctgcggttgatgtttttttgtaaatgctcgatctgttgtttggtttgattcatggtttctcggaacagttcgatttcacttggagacataccgcttttcaagtaatgcgcttctttttctttcgtcagtataggtaacacattgggatttgcttctaccttacgccccttcagaccaataaataccagaatcgcgccaacgatcagcaacaagacagtaaacaaatcagtgcctgtggaactgataaaggcaaaaagtgtgattacagcgatcgcagaaacgatcagccaaatattttttttcatttttcctcctcctaaaattctttggacaagtaatatagggattgttcgacatccttattttagcatgttcactagtagaaaaatatcagacttggggtggattttccgatatttagtaaaatcataatctttcttgctctttcttaaggagatatttttgagaaactatgctaaagtattttgtagaaaagacgttaaaggtcaggtgaaaaaatgttaacctataaagattttgaagaaaaaacgattgtcagaaacgagatttttcatggaaaaatcattgatgtcgttgttgatgatgtcgcattaccaaatggcggtactagcaaacgagagttggtctttcatccaggcggtgttgcagtgatcgctgtgacagaagaaaataaaatgatttttgtccgccagtttcgcaagccattagagaaagtcattttagagattccggcaggcaagatcgatccaggagaaggtgcacagcccgaattgactggtgctcgtgaattagaagaggaaaccggctaccgagcatcaacgttggaacatgtgcattcgatgtatctttccccgggctttgctaatgaagtgctgcatttgtttcacgcgaaacaattacaaaaagtagagaacccgctgcctcaagatgaggatgaagtattggaagtgtatgaattgacaatgaaagaagccaaagcagcaatcgcagatggaacgatctgtgatgcaaaaacgatttttgcgattcagttttgggagcttttagaattgaaacggaggaacagtcgtgcctaaagaaccactgatcacccgctctgaattgcgtcgacgtcgtgaagaagaaatggctgcttctgagcgaaaccaaaagatcgttgctaagcaagcaaacaaagagtggaagcaaaaagaaaagcaaatcgacaatcattatcggaaagtccgtaaaaaaaataaagcgatcactaaaacgagagcaggagaaaatcagaagtcccgcaacatgaatacttttttgatcaaagcaatcgtggtagtggcattgctgctgatcgtagttgcattagcgatctttttgctttaaggaacacgattaatcgggtttaattcgttgatcagcacatgtatctaatcaaaaaccagcacgcagagcatcagcgctcagcatgctgttttttttgttttatggctgggatggcttagcagcgctatatagaaaaagagcagcatcttgccccataaacaactgtggaccttcaaaaaatgtttcataacttactgaatcaaaacctactgattctgctagttggagcagcgtgtcttgctcaaatccattgtgtactttaggatgtgagacggattggtttttattgaaatcaacgatgaacaaacgtccgccgggttttaacaattgataaagttgctgcagtaaatgttctgtgtcgggaatatgaagcattaccagcgacaacagaacgatatctgcttcttcatgaatggactccttcgttaaatcgtggagtgatccagaaacatttgtcagcccttgctgggtgaccttctgatcaacgatcgccagcatgccctccgcagtatcccaaatctgcagttgcttgactaaaggggccagcggtaaactaacaagacctgttccgccgccataatcaataagaatttgttcacgggcattcatcagttggggtcttactgctgctgtaatcttttcagctagagcaatccttgggggtgtatcgtaatggtcggccattttattaaatatctcagacataaaaacctccttaatggtctgacaaaaaactgttcctttgagtaaaactagtttatcataaaaggagaaaaaatgatcttttattaagatataatgtataggatcgtcaggaggctacaagatgaaaattggtattatcggtgcaatggatgaagaaatcaagatcttgcgggaagcattggaagctcccttatcttgggagcgagctggagcactatttatttccggcagtatcggcaatcatgaagtgatcgttgttcgatctggaatcgggaaagttgccgcttcactgacaacaagtttgctgattcagcaatatggggtcaacatggtgatcaatactggatctgctgggggaatcggtgctggtttagccgtcggcgaccttgtgatttcagaaaaactagcttatttcgatgtagatgttactggatttgggtatacatatgggcaactcccagggggaatgcctttgtatttcgaggccagtcgttacttgatcggcgaaatgaccaaagccgcagaagcaacgaatcacaatgtaaaaaatggcttgatcgtaacaggggacagctttatcaatgacggacgtaaagtacaagaaatcctaaggcacttcccagacgctttggcttgcgagatggaaggtgctgcgatcgcccaaacagcgaagcaattcaatattcctttccttgtcgtaagagccatcagtgacactgcggatcatgctgcaacagtttcctttgacgaattcattttggaagccggcaagcgctctgcagaaatggtgctcgcctttgttaaaaagctgaaataaaattggaggagatcacaaatgaacgcattactctcaattgattatacggtcgattttgtagctgatactggtcgtttgacgaccggtcaagcgggtcaagcgattgaaacaacattagtagatcatacccaacgatttatcgatcaaggggattttgttgtctttgccattgatcgccatgaagcagaagatccttatcatccagaaaatcagttgtttcctcctcataatctggcagggtcagagggacggaatctctacgggacactagctgcagtgtatgaagatcacaaagaaaaagaaaatgtttactggatcgataagcgccactactcggcgtttagtggaacagatcttgacattcgtttacgggaacggggcattactgcactttatttgactggtgtctgtacagatatctgtatcttgcatacggctgtcgatgcgtataaccttgggtatcgattatttattttcaaagatgctgtcgcaagtttcgatccagtcggtcatgaatgggcgttgcgccactttgagcagacattaggggctactattctttaaaaaaaggagctgagtgtaatgggatttatggatcaattaaaagaacagtttagtttcagtgaattgacaggattgtatcagtcctataaaagcggtgaattggatgttgacaagattttgaatgatacgttcatgcaaaagtataccgattttgaaaatgtggaagcattgatgacaaaactaggcattcaagataaagatcaactcatggactttatgaaagatagaagcaaccggtatcatgctgaccaagtcgtaaaggaccattcccaatttgattctctaatcgaaatgatcaaaaaagcactaggaaaataaaatcaccgcccccgaaaagttagctgtttgctgctaacttttcgggggcggtcttaatattgtatcttttgatgaaggtgacggctgattgtatttctgaactactttggctaatgatgtgaggtgaatcctctttttttagaaaagttgcatcaacaaatggaccaatgattcataaccaaacagttcgtaacaaatgcctcgtagcaagctgtatcttaccagatttgaacacggtcttcaggagcccggtacatgccatctcccggttcaataccgaaagtagtgaagaaggaatcgatgttttgaacttggatgttggcccgtaacttggcagggccatgaacatcaatggccagcagcaactgttgatattgttctttggcttttgtgcgccaaatttttgcccaattgataaagaagtcttctagtgagacgtcagtttctttttctgctgcttctagtgcacagcttaatccaccagcatcggcaatattttccgatactgtcaaggtgccattgaccgttccaccagcaaatggcaagccgtcgaattcattgatcatttcttgagccaatgtctcaaaatgggccaggtcctctgctgtccaccaattattcaggttgccgaattcgtcaaatttggctccgttattatcaaacgcatgggaaatctcatgagcgatcactgcaccgatcccaccataattggcacttgctgattgagaaagactgtaaaatggtgcttgtaaaatagctgctgggaagacgatcacattcttgaaaggatgatagtaggcattgactgttgctgcagacatttcccactcctcgcgatcgaccggtttttgccatttgctaaaaagatcttcccggaagatacgtccaaaacgtagtgcattttgtaacaatgatgcatcagggtctgtgtgcagtcgatcatagatggctgggattttgtctggataaccgacatggattcctagtttatttaatttaacgattgctttttgtttggtatgctcgctgagccaagtattgctggtcaaacgatcttgatagacgccgatcatcgtttccaccatatgttttacatcattttttgctttttcaccaaaatacttgcgaccataataatcaccgacgacttgactaaattggccaattgtcagataataggcggctttttctttaggcatcgcttcatcaacgccagagaggtaccgattgtaggctccgccgagttggcgtagttcttcactaagatatccagtgtagcgcaaactttgatgaacgatcatccagcttttcaataaatcaaagtgggtaggagagacaatgatatcgaatgcctcaaagtactcaggctcagtcacgatcagctcttttggttcggcatttaataaagcggttaatgtctttttgaagtcgagttgcgccgaatgctgtgcaaaggtatctagactttgcggattgtaatttttgctgtaatcggcattttcttctgcactgcgaacatgaggagcaatcaatttatcaaaagccagtgtttgttctaccagcgactctgcttcggattgtgatttccctaatttcgttaagagcgcaacagcattgtcgaagaaaacttgtagtaactcttctgcctgcgggtggtcagtataatatgttttgtcaggcaagatcgttgctggcggataggccaacagtgtattcattttcgcgtttttcatatcggagtcgatatcgaaagcaaatggtagttggatgccgttaagaatgaattcaggtagctgtgcatttaactcgtcataagacgcaagggtttcgatttttgccaaaatcggcaaaacttcttgacctgcgttttcatcacgggtagcaaaatcgcttgctaagcgatagaaagcaacggcgtctttcatttttcctttaggaattgctaaaggatctgccgccatattcttgaactcagccatcatcaactgatcgattccgtctaccagatcttgaaaacctccagttgccggtttatccgcagggatcaccgctgattccaaccaatcgccattcacataatcataaaaatcatcttttaataatgttgtcatatgcttcgctcctttttatgctttctcctattatggaacaaaattttccagtacgcaaaaaaagtttgtttttttcttaacgaaaaagttccttagtgtctaaaccggctgattcccgtggtactattaagatatactttggtaaggaggaatggcgatggaagaaagagagaacatagatacttggcagggaataccagaagaacgattccgccgctacaaatcttgggtaacaccttccggctatttgtgcggaacttatgctgccaccgtgtttttggcttattatcaagattatatcgatgagcagatcatccctaaaacagtgagaaggaaaaatcagctgcagccgggcgcactgactgacatcttgcggctcttgattcaacctcatggattgccaacgattgcttggcaggtggctcatggactatcacgctttttcactcattttgatctaccttatcgggggcgtgccacagttttcggcggctggcagcgagcctgcaaacggatcgatcaaggcaaaccggtgatcgttggtctcttgaagcctttaggaagtacctacggcaatcactgggtagtcgcatatgcttatttagaaacagagaccggacgttatctaaaagttcatgacaactgggggaattacaatcaagtgattccagccagctggattaacggaactgtctcgttaccttaaattaatttaatgaaaaaagcacctataatgtgctagaataaaagaaacaattcacttcacttggaggcagacatgggcgaaagttataaagatagttcattgaagattttcagtttgaacggcaacagaccgttagccgagaaaattgcaaaagttttcggtacagagttaggtaagtcaaaagtaacacaatttagtgatggagagatcgcgatcaatattgaggaaagtgttcgtggcgatcatatttttatcattcaatcaaccaatgaaccagtcaatgatcactatcttgaattgttgatcatgatcgatgccatgaaacgtgcaagtgccaaaacgattaatgtggttttaccgtactatgcgtatgcaagacaagaccggacggcaaatcctcatgaaccgatcacggcaaaattgattgccaatatgttagtggaagctggggcgacacggatcttgacattggatctgcatgccgtgcaggtgcaaggcttctttgatattcctgttgataatctatttacgattccgcttttcgcgcattattatcgcgagaaaaaaatgatcggagacgaatatgtcgttgtctctcccaaaaatagcggagttcagcggacccgcagtttagccgaatatttagatacagcgattgcgatcgttgatcaagatgaggcagatggtggctatgtgattggagatgttgccggcaaaaaatgtattttagtagatgatattttgaatacaggcaaaacattgtcaaaggcagcagatttgctaaaagaagcaggagctagtgagatttatgcgtgcgtctctcatgcgttattgtcaccaccagccaaagatattcttgatcaatctgtcatcgaaaacatttgtgtcacagattcttgttggactgccgaagaacggcatccagaacggttgtcttacctttcttgtgcagaactgatgggcgaggctgtcaaacgaatccacgaaaatacaccgatgagtcccctgtttcggttagaaagcaaagaatacaaataagaagcaagagagttcggttattctggactttcttgcttcttatttgtcatgagacagtgcaatttatgctaagttattgaggttcaagacagtctctcgtttaatcagcttatgcgggacgacaagctgaaccgcatttgaaccttcatggtttaattgtgccatcaagctttctgtggcgatttttcctaaggataagacgttgatgtcaatgctggtcaagtaaggatgggtcaatgtagcaaaaatcgagttattaaagctgatcacagatagatcatccggaactttatacccgaacatcgttgccagttggatgatccgaactgcaaaaagatcatcgattactacgattgccgttgcttcggtctctttgatcgttgtctcgaaattgacatagtcttctgcctgttcaaatgtcaatgccggataaaaaggcaggttggctagcatcattgctttttgatagccaaagaaacgttcgaaatagagattttcgtgagttgtattcgtagcaaacaatatcttagagtgtccttgggagatcagatactctgtcgcttgttttcccagcatttggttgtcattatcaacaaaaacgatattttgttcattgctgtaaggatgtccaatcaatgtgaaaggaacttttttacgaactaaataatcaatgattggatctttttcatcggaatagactaagataaaaccatccacttgtttttgaaggtgcatacgttccacatttttcaataatgtatcaaaatcacgggcagaggcaaccgcaaccgtcatttggtggtggcgagcttcttcgttgatggcttcgatcgtttctaaatagaaaggatttcctagccgttcctttgaatccaaaggcggcaagataacaccgatcgcgcttgaaatctgcttgcctagatttcgcgcagccaaatttggcacgtagcccatctcagccatgattttgcgtactttcttttttgtgtcttcagagatactagggtgatcattcacgacccgagaaacagttgaagtagcaacgccggcttttttggcgacatctttgacagttacgctcactgttttccctccttttttagcttatagtatcataaagttgtgttattttggtagccggaaagaaaagaaagaagaaatgccttcatttcttctttcttggtttctgatcaataattaagcaatagttactgagacttcttcttccagcagatgctcttttccataaagctgaactgtcaatggctcaccactgattttctttagtgtgacagtttcttctttaacagaaatgaataataagcgtccgcgataattgatatggaaagcatagctgttccaagtcttcggtagaaacggggcaaaacctagatgggcatggtccgtcttcatttgggcaaatccttgaacgatcgctaaccagctgccagtcattgaagtgatatgcaaaccatcgtcggtatcattgttgtagttatccaaatctagccgagccgttcgttcatacatttccagtgctttttcttccattcccagctcggctgctaagatggcatggatactaggagacagggaagactcgtgcactgtcattggttcatagaagtcaaagttgtttcgtttttcctcttctgtaaattgatccccaaagaaatagattccttgtaagacatccgcttgtttgataaagcaagagcgcaagattcggtcccatgaccaattttgattcaatggcaagttttctggatctaaatcagtgactggcatcaaatctttgtctaagaaggtatcgtgctgaacgaaaattcctaagtcttgatcttctgggaaatacatattgtcaatgatatcctgccagtagtcttgctctttttctaggatcgttacggttgcttctgtggcatattctttataactttgtaaagtatagctcaagacccaggtagccatcttgttcgtataccagttattgttgatgttattctcatattcgttggggccggtaacgccatggatcatatatttttgctgacgtttggaataatggacacgatctgcccagaaacgagcgatggccgttaatacttccaagccttcttttttcagatagctcgtatcacctgtgtaattcgtgtagttatagatggcataagcgattgcaccatttcgatggatctcttcaaaggtgatttcccattcattgtggcattcgatccctgtaaatgtcaccataggataaagcgcgccagccaagccttgtttttgcgcattgatatgggcttgcggcaattgattgtggcgatatttcaacagattccgagtgatttctggtttcgctaatgccaaataaagaggcacagcataggcttctgtatcccaataagtagcgccaccgtatttttcaccggtaaatcctttaggtccaatatttaaacgttcatcttctccataataagtcgagaagagttggaataaattgaaacgaattccttgttgcgcagcagcatcgccttcaatgatcacatcagctagtgcccagcggtctttccaagcattgacttgttcttgccgtaagtcttcgtaaggtgcgctgtacacttggaaaagctctgcaatttttgttacttgatcatgaggattgacatcacgactggtaacgataatcacgtctttttgtaaatgaaagacagctcctgtttctcctgtaaaagtaaacgcgtcagcaatcgtcaattcactcgtctctgtggatgctggctcttgactatgacgcattgcggcagtgaccgtgaattgctcaatgtcaaagttgttttcaatggtacgggtggtcagataacgatagttgcctgagctgccgtggtctaattcttcccagaagcgttcttcgtaattactatcttcattgcggacattattgtctagtttagaaatgactgtgatttctgctgatccttcaaggatttctgcctgcatcgtgattaccgccatttctcgcttgacgatacttaaaaagcgctcaaaagtaaatttgacagttgcgccagctaatgaaaccgtaaatgtccggcgtaaaattcctgtttgcatatccagttccatataaaaatcgctcggactgattttcgcaagatcaacagcctgattgttgatgaaaagatccattgcaatgaagttaacagcattgatcacttttccaaaataatccggatagccatttttccaccagccaacacgagttttgtctggataccagacccctgccagataagtccctagatggtgatcgccactatattgttcttcaaaattaccccgcatccccatgtagccatttccaatacttgtaagcgactcttgtagtcggcgattttctttatctaaagtagttgttgcgattttccaaggatcgatatcgaacaaacgctggatttttttcataggtttttcctccaaaatctttttgataactctataataaatgcaaacgattgcgttagtcaagcgtaaatcattggtttctatgcttttttaaatagaagtgtgacaaagagctgtttttgcgcatttttataaattaatgactgaggagaatgtaaattgaaatttctcggtttacaaaattttcaatctccgctacaatgtggttattaagaaaccgattgcgtaaaacggtggaggaggaagaaagaggatgaaaaaattactaagctttgaattctggcagaaattcggaaaagcactaatggttgtggtagctgttatgcctgccgccggattgatgatcagtattgggaagacgatccccatgattaatgccgattgggcatttttggtaacgaccggtggtgtgatcgaaaatattggttgggcaattattgggaatctgcacttattatttgcattagctatcggtggtagttgggcgaaagaacgcgcaggcggggcattcgctgcggggattgcatttgtattgatcaatcgaatcacaggttcgatcttcggggtcacaagcgccatgctgacggaagaaggggcttttactcatacattgttcggtacgaaaattatggtggatggcttttttacaagtgtcttagaagctccggcactgaacatgggtgtttttgtagggatcatcgccgggtttgtgggtgcgactgcttataataaatactataatttccgcaaactgcccgatgcgctttcgttttttaatggcaagcgcttcgtcccgtttgttgtaattgctcgttccgtggttgttgcgatcgtgttagcgatcgtttggccttacattcaagcaggaatcaataactttggcttgtggatcgcacaatcgcaagaaagtgcgccgattttagcacctttcttgtttggaacattagaacgattactattgccatttgggctgcatcacatgctgactattcccatcaattatactgaattgggaggcacctatacgatcttatctggtgcacaagcggggacacaagttttcggtcaagatcctctatggttagcttgggcaactgatttagtcaatatgcgaaatgcaggggatacttcacaataccaattcttgatagagaattttgtgcctgcacgtttcaaagtcggacaaatgatcggttcttctggtattttgatgggacttgcctatgcaatgtatcgcaatgtcgatgcagacaaacgccataaatatacctcgatgtatttatccgctgccattgcggttttcttgacaggtgtgacagagccattggaatttatgttcatgtttgcggctgtaccgttatatgttgtttatgcagtcgttcaaggggcagcatttgctatggcggatatcgttcacctgcgtgttcactcctttggaaatatcgaactattgactcggacaccaatggcgatcaatgcaggtctgggtcaggacttgatcaattttgtcctagtaacgatcgcatttggggtcggcatgtatttcttggctaacttcttaatcaaaaaattcaactttgcgacgcccggacgcaacggcaactacgaagtagaaggagctgacgaaaacgtagcaacaactgcctctgacggaacgttagatccaaactctcaagtggttaagatcattcatctgttgggaggacgtgaaaacatccgcgatgtagatgcatgtatgactcgcttaagggtctctgtcaaagaccctagctcagtaggagacgaaaagtcttggaaaggtgctggcgcattaggtttgatcgtaaaagataacggagtgcaagcggtatatgggcctaaagccgatgtacttaaatcagacatccaggatatcttggattccggtgtggcgattcctgaagcagtcataaaagaagtcactaatgagacgaatcacgaaagccaagggataaccgctgaggttgtttcagtagccgatgggcaagtgattccgatcacggaggtcagtgatcaagtctttgcagagaaaatgatgggggacggatttggcgtgattcccgataacacgcaggtgtattcacctgtctctgggaaagtgacgaatgtttttcctacgaaacatgcgattgggttgctatctgatgaaggagtcgaagtattggttcatatgggcttggatactgttgaacttcaaggggcaccattcacagtttctgtcacagaagggcagcaagtcacaaaaggtgacccgttggctttaatggatctcgcagctatcaaagaagcgggtaaggatacaacgatcgttgtagtaatgacaaataccgatcaaatcgattcctttgaattgtcccaaactggtcagcaaaaagctgcagcagttgttggaatcgtcaaactataataaaatgactaagagctgtgccataagtattttaccaaactgaatatccaaacgatcgtggggttgctacagtctggtagtttctcgtcgcaattcacgagaagtacagctgatctcatacagtgcggatagtttcgtctggttcatacttatggcacagctccgttcttttatttacattttgaaagaagataatcaaacgcagaggagcgttattcatgaaagttttaacattaaacacccatagctggttagaagacgatcaagaagcaaaattaaaagtgatcgcacaagaaatcgcagcaggagattatgatttgattgcgttgcaagaagtcaatcaatcgattgctgctacaacgatcgttccggatggtctttattgtccgacagaggcgatccttgagatcaaagaagacaattttgctttgcgcttagtagaagaactgcagattctggatcacgattattattggtcatggacttacagtcatgtgggttatgatgtctatcatgaagggaatgccttactgtccaaaaatccaatcattgccaaagaatatttggcttctgagacaaccgatgtctgggaccatactacgcgaaaaaatcttagcggtctcacagaagtagacggcaaaatgatccaagtgttaagctgccatttttcttggtggaatgacggcaagtttgcctatgaatggcagcaaaccgaagcgtttttgactgagcgagcagcatcgctcttgcttttaggtgatttcaataatgaggcagacagcttgggttatcagctggttaaaaacagttcattgcagctgcaggatagttttcttgccgcaacaaaaacgatcggtgaggcttcggttgttaaagcaatcgatggctggcaagacaatcagacagccttgcgtatcgattatgtctttgcctcacagaatgaacagcccgtagagtatgaagtggtctttgacggtcagcggctgccgatagtcagcgatcattttggtatctgtgtggtttttgaataaccaagaatagagacgacttcgattattcgcttgctatcacttgaatcggctagagattcaggaagcagacaatcgattaaaaaaaggatgagaccagaaacgaatttctgatttcatcctttttattttgatcaaatgtcaatcgaaccatagcggttttttaaggcagtgcgtattaagcgttctgccaaatgttcattccgggcaagcagtggaccatggaaataggaaccaaaaacattgcggtagaccacgccttctgtttggtcctcgccattgtttccctgcccttctacgactttacctagtggtttctcacctttgccaagaaacgtccgaccattgtgattttcaaaaccataataggtctcatcgaattcttcattatggataacgatatctccgatgaagcgattgttttcttgactcaatgtgtaatgatccaatgcgctaattcctttgattttctctccgttagctcccatgtagtaatgacctaacaactgatacccgccacaaatggccaacatgactccatcgttctcgatgtattccgtcaatgcttctttttttgtttggatatcttcagaaacgatcagctgttcaaaatcctgtccgccgccaaaaaagactaagtcatacttcttcggatcaaatggttcatggatgctgacgacttccgaaatgaattctacacccattttttcggctacataacgcaacatcaacaaattgccattatccccgtaggtgttcagcaaattcccgtaaagatgagcaacattcaaacgataattagccacgatccatcccccctttgatatagcctttttctgccaattttttgcgtagttgcaaaacagcagtataggttgctaggatatagactttttcagttggtagattggcgatatctttaatgacctcatcaagatcttttgtttcggtgatcttttcttcgggaattcccgctacttttaaacgcagcgtcatatcttgatggcggtcgccgccagcaatgacttgaggaatcgccatttcggcaaatgcttcatgatttccatcccagatccagctaacatcaatgccgtccgcataatttgcattcaagagactgacgagagaaaaaggatacggagataagccgatcatatcgatcacttgattcagtcctaccggatttttgactaacacgagtgtacactctttgccatcgatggtaatgacttcttgacggccaaagactttttcatcataggccaatccagctctgattttttcaggtgcgacttgataatattccgctacagcggtcgctgccaatgcattatagacattgtacatgccgccaacttcgattccatatgaattcccatcaatgataaaatcagcagaagtattgtccattgctgtgatggctgtcaatttgtagtctagttttggacgtttgaagccgcagttcggacaatagtatttgcctagattcgcataggtaatcatttggtaatgtaagatgtggtggcattctggacaaagaaccccgtctgtattgtaatgggccatctgctcctgattaggtaagtgatcaaagccataatactttcttggattaacagtagtgacagaattgaacaacggggaatcaccattacatagaattgtggccgtcggtgaatttgctgctccttcaacgatcattttatatgttgtatagatttcaccataacggtccatctgatcgcgaaaaatattcgtgaagacaaatagttcaggtttgatatacttcgttactttgctaagactagcttcatcgatctctagtactgcaaactttttgccgccttttggtttggcagataagaaagtagaaacgattccttggaccatattggcacctgttggatttgtcagcacatcatcaaattcttgccgtaaaatattcaccgtcagtgcagtagtcaaggtttttccgttcgtaccagtgataacgacaacttggtaatcttttgctagatgatctaaaatatgcggatcgatttttaatgctattttcccaggcagacttgatccgcctttaaaaaagttttttaatacccactgagaggtcttaccgactgtgacagccagttgacttcttaaccccatagttgaacctccaaacgagatgattgtctttttagtttaaattcaatttatcataccatatgttctaaaaaaggttaaacggcttttcgatttctttaagtttctgcaaagagttcagtttattgaaccaaaaaaggcagagacattcgttacaaacaagatgtctctgccgcttcaaaacgcttgtggaaggctcgcgactttaagatacaacgcttagaaccttcaatagcgccattttactggctgtttaaccaataataatcttctcggttgggtattcataacctaaatctcgggtttcttttggcacaaacaacaacaacgtataaagcatacctacacgtccaatgaacatcagtaaggctatcactaacttacccacacttgagagatcatcggtgatccctaacgataaaccggtggtcccaaacgcagaagctacttcgacaatgatggcgatcaacgggatatcttcagtggcagtcaaaaataatacgcagaaaaagcacattcctaaggataacatgaagacaacaaccgacttacgcacatcgtcttcatcgatccgtcggccaaatatgttgatattgtcttcactctttaagaaggcataaagataaagaccaataatggcgatcgttgtcgtacgaatcccgccaccaactgaacttgggctgcaaccgataaacattagtaacgaaaaaacgatcaatgtcgtagtctgaaagttccctaaatcatggatctgcagtccagcattacgggtagtcatggaataaaacatactgttgatccaggtgctgctaaagccgtaatctttgaacagatggtctttctctaggaaataaatggcgatcgttccaccgataaacaaaatcacaaaagccaacatcgcgatttttgtaaacaatgaaaagcgaaaaggcagttgtcggcgattttttttcagcttgaagagggcccattctcggaaatccataatcactggaaacccaatcccaccggtaaaaatcaaaaacatgatacaaatcaaaaagaaataatcatgtgcgaaaggtaaaatggaatttcctgtcacgtcaaaaccagagtttgtgaccgcggaaatagcttggtaaaaaccataaaatagggcatcccgccaattgtcataatagccattaaagtaaaaataaatagaaaaaatagcgccagagatggcttggcaaagtaagatgatcgtaaacgtgattcgaatcatccgcacgattccgcttagctttggctgattcatatccgtcataatcaactgacgctgcttcaatgagatctttctccgagaaacgatcgcaaagaaagtggagatcatcataatccctagtccacccacttgaaaaagaacttcaagaagcactacaccgcgatcattgaacacatcatcgatagggaatgtcgtcaatccggtgacactgaccgtgctgactgccataaaaaacatatcgatgaaggaagcatgagaacgaggttcacgaaaaaagggaagataaaataaacctaaggaaataatcgtcatcagaatatagtaaaaaacgatcacttggatcgaagaaacattttgggcaataaaatatttgcttttgcgttgtgtcagacgagcaaaccgcgtgaaattcataactagtctcctcactaaataaactacccacagtataccaaagaaccaagcagtttcaaaagaaagcaagattgaaagtaagtagcagccaatatcatcaaagaaacgctctgcaaaaatatgagatagtgccgcaaaacaattaatggaacagagaagacgatagcctgtcattgagagagtactagaagatagcggtgagccggacaaaaaactgtatgcccgataagtctgttgggcatacagtttttttgaagagatcggttagttagagtgcttccaccgcttcgattgcgcgaaagactttttctggagtgatcattgggtcgatcaggacaaatgtttcttcttctttaacggcataagtcaaaacaggcgcaaaataagcgcgatccacacgagtgacatgcaagtcttttagtttcataggtaagtgcaatgcttcgtagaaaggacgcagttcctcgataacagcaaaatcgttggtgtaggcaagctgtacccagatgcagtaggccactttattgccatggaggacactgtgggtttcgctcagataagataagccgtcatgtaatgcgtgggcgccagaagttctgccaaactctacagcaaatccaccaacttctcctgctaaagcgatgatggcatctgtgattcgcgcaaaagctggcgtcaagcgcccggcttctaaatcagtgactgcttggatggcatctgcgatcaagagttctttgattagttttgcactttgaaaaccgagccgaaccaaggctgttttatcttcttctgccatcgtgcgtacaatggcttccatttcataatacttggctagcgtgtctgcgatgcctgcaatgaaataatccacgggtgttgctagcaagaatcgagtatcgacgatcgtcatataagccccttttttggcgtaatcgatcttgcagattgtgtggtctgggtaataggcgacaatcacaggagtaaagggtgcacagttggaaaccaatgtagggatgacgatcagctccgcttccattctttctgcagtaatttttgcggtatctgcgacacgtccaccaccgatcgcaagcaggacatctgcgtgtttgatcttatccgctaactcctgagcattctcataacttgaggagccatcatagcgataaacaggatagtcaaatggatgcggataataggttttaaaaacgtcaaatgattgatcgccagtaatgacagcaacctgatcaaaatcattgagatactctggtagatcaaaaagaactccttcaccagtaatataccggtttggtccagggcggacttcattggctaacataacacaacactcctttgcaatcgtcagaattttctaattagtgtaacgtggaatagcgcctgctgtcaatttttcttttgagcagttttgttcagatcagccaggccaaagccaatcggcgcaagcaggcgtaaagagggcataaaaaaagaccctaacaaaggagagtttgttcttgctagtcttcgcataatcaagactgttttgcgaagatcctctccttttgagggtcagttgttgggcgagaaaacagcactatttctatctcagaaactaaaggaatattcaaactgccgcttctcaaaataggttatgtccagttttgacggatgaaaccagctcgtcctgaaccttcacggtaggcgttgtaatgcgccgtatttttcttataaaaatcttgatgatagtcttctgctggatagaaaggttcagcaggttcgattgttgtcacgattggatctgtaaagcgaccgcttgcttgcaaagcggcttttgaagcttctgcgatttttcgttgttcttcactattgtaatagatgactggacggtaagagtccccacggtctgcgaactgaccaaaggcatctgtaggatcggtttgttgccaatagatagccacgagttcttcatacgttatttgttcaggatcgaaagtgatttctacggcttctgtatgtcctgtggttccagttgttacttcttgataggtaggatgagggacatgtccaccggtaaaacctgagactaccgaaagaattcctggtaaagaatcgaaaggtttgaccatacaccagaagcagccgccggcaaaaattgcagtatctttcattgtgattcctcctttggttttatggtatgcttcttatagagaaagacaagcgatatgcttataagaaacggccaaagaaagcgaggtttgctgtggatacgatcatcattttattgcgggggaattctggcagcggaaaaacgacagtagcaaaagcgctgcatcaacaattaggggcagaagcggtgttgatctcacaggatgtatttcgccgagaaatttttcacgtgaaagatacgcctaataatcatgctgtaggtctaatgatggaggcccttttatatgcgcgagggaaggttcctttcatcatcgttgagggaatttttgcccgtgaaaaataccaggacttcttgctctttttactagaatcctttgagaagtgtctcatttattattttgatgtgccttttcaaacaacgattgaaagacaccgaacacggccgcaacgggtatttttttccgaatcatcgctacaaaagtggtggctcgaaaaagaccttctctttggggaaaacggcatagcgtccaagagcaatgatacgagtaataaatcagtcctctcaaaagagaagatgtttacagagaagcagacaatatctgaaatgatcacgatgatcttggaggatacgaaacagtttcaaaaatagccttgaagcaaacgatctgttttccaaaaaaactaaagtgaggtatctctatgttagacaaatcaattccttatgcagaaatttggatggagcgcatggctgcggatgaagtagcaccggtccctgactcaaataactacatcattcaaccttatcaatccggtgatgcgagtgagtgggcgcggattgagacagcggtgggagaatttgatacagaagccgcggcacttgcgtattttgaaaaagactttctcccctatgaatctcaattgccgcaacgaatgttttttgcagtggatccagaaggaacaaaggtaggaacagcgactgcttggtggaagaagaagcaagatggcaacattgtgccgctcgttcattgggtagcagtcattcccagcgctcaaagacaagggatcgctcgcggcttggtaaccaaagttatagaaacatgccagaaccaaacggcagattccgaagaatctgctgccgctatttttctccatacgcaaacatggagtcatgctgcgattggactgtatcaacaactaggcttcaaacttattgatacagactatcagggacagatgaatcccgagtacgaacaagtattgactattttgagagacgtggcgcagaaggaaaacgggcagtaaagccaatcatttgcaggcatcgttctgttcagtacccctcttagcgacttctgaatttaaacctgtaaaaattccttgttttcaagtataataccaaaggagtatcaggaaggatgggcaagatggcacaacttttttttaaatatggcgcgatgaatagtggcaaaacgatcgagattttaaaagttgcacataattatgaagaacaagacaagccggtcgtgattatgaccagcggcatcgatacccgaagcgggatcggaacagtttccagtcgtattgggttagagcgtgacgccattccgattttcgatgagaccgatttgtatcatttagtaaaagatctaggatatcaaccctattgcattttgattgatgaggcacagtttttgaaaaaacaccatgtcttggcgtttactaaaatcgtagacgaattaggcattcctgtgatggcatttggtttaaaaaatgattttcgcaacgaattattcgaaggttctaaatatctgcttctttatgcagataaaattgaagaaatgaaaacgatctgctggttctgccacaaaaaggcgaccatgaatctgcattacattgacggtaaaccagtctatgaaggcgatcaagttcaaattggcggtaatgaagcctattaccctgtttgtcgcaaacactattttcaccctggaatcaaaaaagaaggagaataaaacatgtacgatcagttacaagcgattgaagaccgttatgaagaactaggcgaactgcttagtgatcccgctgtcatttcagatacgaaacggttcatgcagttgtccaaagaagaagcaaatacccgagagactgtcgaagtgtatcgccgttacaaagaagtcgttgaaggcatcaaagatacagaggaactattgggcgaaaacttggatgcagaaatggcagaaatggctaaagaagaactatctgacttaaaaaaagaaaaagatgttcttgaagaccgcatcaaaatcttattattaccaaaagatcccaatgatgacaaaaacattatcatggaaattcgcggggctgcgggtggagatgaagcggcactatttgctggagatctctttaatatgtatcagaaatatgcggaaacacaaggttggaaagtcgaagtgatggatgccaacgttaccggcatcggcggctacaaagaagtcatcatgatgatcagcggtgagaatgtctattcaaaattgaaatatgaaagtggcgcgcatcgggtacaacgcgtgccgtcgacagaatctcaaggacgaatccacacatctacagcaaccgtagtcgtgatgccagaagcagaagaagtagagatcgatattgctgataaagatatccgaacagatatctatcatgcttcaggcgctggtggtcagcacgtcaacaaaacggcatcagctgtccgcttgacacacttgccgactggtatcgtcgttgccatgcaggatgagcgttcacagttgaagaaccgtgagaaagcgatgaaagtcttgcgggcaagagtatacgaccaaatccagcaagaagcacgaagcgaatacgatgcaaatcgtaaatcagcagtgggaactggggatcgttctgaacggatccgtacgtataactttccgcaaaatcgggtgacggaccaccgcatcgggttgactatccaaaaattggatcaaattttggctggaaaacttgatgagatcattgatgcattgatcatgtacgatcaaacatcaaaattggaagaaatgcaaaatgggtaaaacctatcgagaagtcctttcacgggcttcttcttttttagaaacaaagggactggaagggtatgcgatccaatacctttttctggctcgtaaaaattggcaaaaactagattggttgctgcatatggatcagcaaatttcgccagctgataaagtgcaaattgaagcagatctgcagcagcttttagcgcatcgtcccccccaataccttttaggctatgaagagttttatggccatcgcttcaaagtaacagaagacacattgattcctcgaccggaaacggaagaattagtcgctttgtgtctggagcaaacagaacctgcagagaatttgcgggtcgtagatattgggacagggacaggtgcgatcgcggtctctttgaaattggcacgtcctcactggcagatcgctgctgttgatctttcagaggccgcattggcggtagctaaagagaatgcggcgcaattaggtgcggaggtcgctttttatcaaggcgacacgctgacaccagtgggggatcaatcatgggacatcattgtatcaaacccgccttatatcagtgagcaggagtgggagctgatggatgccagtgtgcgtcagtttgaaccccaaatggccctttttgcagcggagaatggtctagtgatgtatcgtaagattgcagaccaggcaaagaagttattgacacctgacggaaaaatcttcgtcgaaatcggttttcaacaaggcaaatctgtccagcgtatttttgcggaagcttttccagataaaaaagttacggtcattcaagatttatctggaaaagatcggttggtcgcagtacaataatccacagcatgtggacaaccatttttttgaaaaatttttttgataaaaaacagtgatagagtaagacttacttgcgaataaaagttataaacagggttatccacacttgacaaacgatttatccacaaaatgtggataaaaaccgaaaaaatgttgataagtgtggaagtcctcaaaaaaaggatgtggataaactgtggaaacaaaaaaatttagtgaagaacaattatccgaagcagcaaaaattttagccgcgggtggattagttgcttttcctacagaaacagtgtatggcttaggcgctaacgctcttttgcctgaagcggtagcacaagtctatgccgtcaaaggaagacctagtgacaacccattgatcgtccatctcgccgacccggaacaactgaaggattatgtggataacttgcatccagcagcggaaaaattgatggcaaagttttggcctggccccctaacattgattttttctatcaaaaataacagtttaccgtctattgtgaccggggggttatccacagcggcattccgtatgccagcgaataaaaaaacactttcagtcattaaacaggcacatgtcccactagtcggacctagcgcaaatacctctggcaagccaagtccgacctcagctgaacatgtattgcatgatttgaaaggaaagatagctggtgtgatcgatgatgggactactaggatcggagttgaatcaacagtcttggatttaagtgatccgacagcaaacccaatgatcttgcgtccaggagccgtgaccaaagaacaattagaaacggttttaggcagtgaagtcgaaatagataaacacctagtatctgaaggtgaaagacccaaagcaccgggaatgaaatacaaacattatgctccggatacaaaggttgtgatggttcggtcagaggactggccagcagcactcgattgggtcaagcagcagcgattgcgagcaggtgtcttggcaggcccatcaatttgtgagacagccagatttgaaacagcagctgtttacatgtatgcggacgacacggttgaggcagcagcaaaaggactttttgcaggtttgcgagccttagatgaatcgatcgctggcttggagatcattttagtgaccgcttttcctgagacagggatgggcagcgcctatatgaatcgcttgaaaaaagcagccaatcaaaatttttttcaggtaaaatagaaaaaacgctgctttgatcataggtagtgcttaggaaatatgatacaatgctagcattaaggtaaaggggtgttgtatgaatggactatcaaacgtttgatcctgatttatggcaagccattgaaaaggaagcggatcgccaacaaaacaatttagaattgatcgcatctgaaaatatcgtttccgcaggtgtaagagcggctcaaggcagtattttaacaaataaatatgccgaaggatatccaggtcgccgttactacggtggttgtgaatttgtcgatgttgttgaaaatttagcaattgatcgtgccaaagaactttttggtgcggcctatgcaaacgtacagcctcactcaggctcacaagccaatactgcagcatatctagcgttgattgaaccaggagatacggtgatgggcatggatctatccgcaggtgggcatttgacccatggctctccagtcaattttagtgggaaaacctatcactttgttagctatggcgtagacccagcgactgaagtgattgattataatgtcgtacggatcttagcgagaaagcatcaaccaaaattgatcgttgctggtgcaagtgcgtattcacgaacaatcgattttgccaaattccgtgaaattgctgatgaagtcggtgctaagttgatggtagatatggcacatatcgcaggattagttgctgctggtctgcatccaaatccagttccttatgcagacatcactacttctacgacccacaaaacccttagagggcctcgtggcggcttgattttgaccaatgacgaagacttagcgaaaaaaatcaacagtgcagtctttcctggcattcaaggcggacctttggaacatgtggtcgctgccaaggcagtcgcattcaaagaagcattggatgaagacttcaaatcctattcagagcaagtgatcagaaatgcgcaagcaatggcaaaagtgttcaatcaagcaccgcaagcacggcttgtttctggtgcaacggacaatcatttattgctgattgatgtgcgaggatttgagcttaacggaaaagaagccgaagcattgcttgaccaagtcaacatcacagtcaataaaaattcgattccatttgaaacccttagcccatttaaaacgagcggtattcgtgtcggcacaccggcaatcactagccgtgggttcaaagaagaagatgctgtggaagtagcaaaactgattgtcaaagtgttggaacaccctgaagatacggctgttttggaagaagcaaaagcacaagtgaaagagttgacggacaagtatccgttgtattaagatgtagcaggaaaagggtttgagccgatgctcagatccttttttgaaggaatatggctatgacgtgatgcaaggttgtatcaatcgttgatttgctttaaaataaaagaaaaaccaaaggagacttttaaaatgggtaaattccaagtaattgaccaccccttgattcaacacaaattaacaatgatccgcgacaagaactgtggaacgaaagtgttccgtgaagttgtcgatgaaatcgccatgttgatggcgtatgaagtatcacgggatatgcccctcgaagatgtagtgatcgaaacaccgatcgaagaatcgacccaaaaaacacttagtggtaaaaaagtagcaatcgtaccgattctacgggccggactaggcatggtcgacggtattctagagttgatcccagcggctaaagtaggacacattggtatgtatcgtgatgaagaaacccttgaaccacatgagtatttcgttaaattgcctgaagacatcgacactcgtcagttatttattgttgatccaatgttagcaactggtggttcagcgatcatggccatcgatgcgttgaaaaaacgcggtgcttctaacatgaagtttgtttgcctagttgctgcgccagaaggtgtgaaagcattgcaggatgcccatcctgatgtggatatctacacagcaagcttagatgaccgcttgaatgaacatggctacatcgttcctggattaggcgatgctggtgaccgtttgtttggaacaaaataaaagaaagagcgtggaacaaaaagtgaaaaacacttttgttccacgctctaaacacgtctaaacgctgggagtaggagcaactccttcggaaataaatcgaactactcaaaaactactcaaacatttgaaaagcaatttccgtgtattcctccttatttcttggagattaccacttttgtcccagtctccttttgaacgaactacattttcgttaactgtttataattaatgatcaatacaccattactttgtgtaacaagcttttgattctccgctgtctgattcaattcaacaaccgcagagttcttaagctgcttagtgactgtaccggtttgttttattccatggatcgtgaacatgacaggagtagcgacctcaaaatttgcaccttcagctgacgggacaacggttgtttcgaacttaccaaatgttgccatgtaaaaacctccttgatatagttaaattataccacattttttgaaaattttcagtaatcctattttttccctaaacttctctttacaaagttgtgtttttttcttataatcttctttgtgttagttgccagcttagctcagttggtagagcaacgcactcgtaacgcgtaggtcacaggttcgaatcctgcagctggcattgaagcagtctaattagactgcttctttttttagatgatttttttagagaaaactttaaagtttctaaattttttctgaatgagaacggggaatcctttcttttctgcgcaaacatcactataatggataaagattctacagaagagagtgtgggcatggaaaatacacgaataaaaaagaatgataatcgaattgactacggtgtgatattacccgtatttttattgtgcttgattgggtttgcgtcattgtatgtcgcattgacgaatgatccaaggaatccatccgtgggaaaaaccttaggatttcaagctttatggtatgtactaggagttatcgcaattatagtgatcatgcatataaaatccaagtggttgtggaagttgactccctatatttacggagcaggattgctggtaatgctgggtctcttgaagttctatgatgcagggttagccgactctacgggctcgcgaaactggctgcgttttggctcctttacgatccagccttcggaattgatgaagattgcctttatcatgatgttggcgctggtggtcacccatcacaatgttcgtcatcgagatcgagatttaaagacggatggcttattgatcgctaaaatgttagctgtaaccattccggtcctagttttagtcatgctgcaaaaagactttggaacgatgttagttttcttagctatttttggtgggatctttttgatgtcggggatttcttggcagatcgtgatcccagttatcgccgcttttgttttgatagggggcgggaccatctttttagttacaacagatatgggacgagagtttctctataatgtcggctttaaagaatatcagtttgcacgtatcgattcttggttagatccgtttcacgatactcaaggccagtctttccaactagcttatgctttaatggctattgggtctggtgggatgttcggtaaagggttcaatgtgagtgatgtctacgtgccagttcgtgaatcagatatgattttctctgtgatcggagagaactttgggtttgtcggcagtgcctttgtgattttattatatttcattttgatttaccgaatgattcgggtttgttttgatacaaacaatgaattttatgcctatcttgctaccgggatcatcatgatgatcttgttccatgtctttgaaaatatcggtgctaatattggcttattgcctttgacaggtattccattacccttcatcagtcaagggggatcggcattattaagtaacatgatcggcattggcttgattttatcgatgcgctatcaggctgagagtacaccaaaaaccttgtaaggagatagctatgatcacattttactggtatccgaaatgcagtacatgtaaaaatgcgaaagcttggctagaagcaaatgggattccctatgaggccattgacatgatcaaagaggtgcctacgaaggcgcaattgttacaatggatcacctctagcggcttgccagctcgccgcttttttaacacaagcggaatgaaatatcgtgaattaggtttgaaagagaaagtaccaacgttgtcaaatgaagaagccgcaactttgttggccacagacggcatgttgatcaaacgcccattgttgattagtgaagatcgctttttgatcaatgggtttaaagaaaaagaatatgaaggagtcttgttagaatcatggaaaagaaatgcttgagaaaaaaagataatttgtgggtactgttcaatggcaaagaatactgtgttggtttgacaaaagaagcacaagaagaattaggtgctgtgtcttttgcttctttgaaaaaagttggtacagccttgaaacaaggagatacgctagtggagttggaagcagaaaaagctgtcagtgaatttccaagcccattaacaggcgtgatttcttctgtaaatgaaaaaatcgatcaaaacgttgatatcttaaacgacagcgatgaaatgaacgcttggctagtcagctttaaagatgttgatccaagtcaatttgacgaattataaaacaagatccaaccactgatttacaaaaagaattgacagcagattgagacgttgctataatttgctcaataaatgaatgctttgaaaagaagagtacatgttcttgacgtacacagagagccctgtttggtgtaaatgggcaacgaagagaagatggaagatggtctttgagcaggatgggtgagtctaaggacaagcctatcacgggatgcacccgttactgtgcaacagtatgcgaagaaattcaagtactggaagaggctgttgatgcgagtcgacagtaaatcaaggtggtaacacggaagttgtgctttcgtcctttgtaacagtataatgtacaaaggatgaaagctttttttgtgtttaactagtgaatgaataaagaaagatgggaaatttatggcattaatcgaattgacccacgtaaagaaatcctttgacggtaaaagtggcgcagtccatgccgtcaatgatgtttctctgcaagtggaaaaaggcgatatttatggcatcgttggttattcaggtgccggcaaaagtacattggttcgtctattgaatggattagaacttccttcagctggtgatgtagtgatcaatggtcaaaatattttagccttgaagaacaaagaattacgagattttcgtaaaaaaattggaatgatttttcaacactttaacctcttgtggtcacgaacagtattggaaaatatcgaattaccattagaattggcagggatccccaaaatcaaacgccgcgagcgggcacaagagctggtaaaacttgtcgggttagaaggacgcgaaaaagcttacccttcccaattgtcaggtggccaaaaacaacgggtaggaattgcccgtgcgttagcaaatgagccagaaatcttgctatgcgacgaagcaaccagtgctcttgaccctcaaacaaccgaagaagttctggatttactgctgtccatcaacaaaaaactgaatttgacgattgtactgatcacccatgagatgaacgtgattcgcaaaatctgcaataaagtagctgtaatggaattaggcaaaatcgttgaagaaggttccgtacactcggtgtttcgtcatccgcaacaagctgtgactaagcgctttgtgcagcaagatttggagccagaagaagatcccgaggaattgcgtcaagcctttttaagagaaaatccccatggccgcttagtgacattgacctttacggaagacaatgcgaatgaaccaatcatttcgcaagcgatccgaaagtatctgattgatgtcaatgttgtttatggcaagattcagcaaacgaatgaaggctcttttggcgcattaaccgttctattgaccggtgaaacagcagaaatcgataaagcattgcgcttttttgcgcaagaacaagtaggcgtggaggtgatcgagcgtgggtaaatcattttcagaaacctattttgattttgaaaaaatcgattgggcaaacatgcaacaagcgacgatcgatacgttatttatgacattcttctctatggtactagtcattgtgattggactaatactaggattggctctttattcattaggtcgcaagcaaacatttggatcacgctttgcctataccttagtctcgattatcagtaacgtgtttcgttcaactccgtttatgatcttgatggttttgattataccgtttacgacactattggtaggatccttcttaggggcaaaagctgcgattccagcattggttctatcagcagctcctttttatgcacggttagtagagattgcctttcgagaagtaagtccaggtgtgattgaagctgccgaggcgatgggagcaagttactgggagattatttataagattatcattcctgagagtgtcccagcattgatttcgggcatcactgtcaccaccatttcaatgattggttacacagctatggcaggggcgatcggtgccggaggccttggttcattggcttggcaagaaggctttcaacggggaaattacactgtgacgcttgtagcaacagtgattattttaattattgtctttatcttacaagcaatcggcgactttttgacaaaagcaacagacaaacgctgattggctgaaaaagaaaaacatcaaacagaaaattgggaggaataaaaatgaaaaagatttttggttttgcaacaacagtattgttaacagtcgctttagcagcctgcggtacaggttcaaataacagcgccgattcaacatcagctagtggagaaaacacgaaattggtggtgggagcatctgtcacaccccatgcagaaattttagaacaagcaaaaccattgttggaaaaagaaggaatcgatttagaaatcaaaaccttcgatgattacatcttgccaaacaaagctttagaaaatggcgatatcgatgccaactatttccaacatatcccttacttgaacaagcaaattgccgataatggctatgactttgttaatgcaggagcggttcatatcgaaccgatggggttgtattcaaaacggatctctgacatttctgaattagctgaaggtgcaaccgtgattacttcaaattcggaatccgattggggtcgtatcttaacgattttacaagatgctggtgtgattaagttgaaagatggtgtcgatgctgaaacagcaacatttgatgatattgctgaaaatccaaagaaattagaattcaagcatgatattgatccttcattattggcaacggcttaccaaaatgatgaagcagacctagtggccatcaatgcgaactttgcttttgggatcgacttgaatccagcagatgattctgttttattagaagcggataattcaccatacgtcaatgtgattgccgtacgcagtggcgacgaaagcagcgataaaatcaaaaaattggttgaagtgcttcactctgacgaaatcaaagactttgtcgaaaaacaatggcaaggttctgtgaaaatcgttgatgcggacgctaaatagtttccttcattaagcagtacaaacagagcagtgacataagttaaaaacagacgaaacttactaaatgataaagagatttgaccttcctcgcaatcttgcgtcgaagacctcctgaatcgcaggagtaatctctttacgtttcggttaggtggtttgtttcatacttttgtcactgctcttttttaattccaatctagcaaaacagaacggttatgccaaatcatttcatacagcagcggcaattcagggtgcttttttaataattgatcgtagtgggggagctggctaagaaacagacgaatgagtgtgagggtatcaggtgaaagtgatccactccctttaaacaagatcagattgccttccaataaagcacagagcaagtggatttgagtgattttgacaagacagatttgaaaggagtcacttcccagacgttctttgagcagttctgcagcaaatatttggttcagcaagtaggtatcttcttcagataaatagaaggcttcaagtccaagtaattgtttccataagaaaagatagttgcgttcatggcgcaaataaaaggcagggacaaagttttttggaaaaactgtagctaatgcgatcccattttccagcggataaaccgcttttcttttttcatggattgttttgatacaaaagaaggcctcactggaactttttatcaagtgtggacgcatccagcgcaacaattgataatggaaaaaacggatttgtatttcgttcccttgtaaaagtggaaaatgcttgcgattcagagataagtgatacgctgccaaagaggatgatagagcagtgaaacgtcgattgacactggaagggctcaggtggcattttctgcataataatggataagtcaacgaaggttcttccagctgggtgttaagaatacggtagttactgctcttttttacaagagaagcgatgactttttttttaactcagtaaccgacattgcttccgtctgtaaataatcaagttggccttttttaatcaaaaatttgattggtaacttgatacctaactcgctggcgatcatccgtctaatagtcttgacggagatcccttgttgcagggctgcttgttggagggggagcggcctttctttgaaaagactacggatcagacgcaacatgcgcaacacttctttctcgagaaaatcctccaagttgtgaatcacctctttcggatgagattacatttattatagtggataactagtttcttggtttttttagaaaagaataatcatcaaagtttaataaataattttcactacaaagagacagatgtggagctaatcagcttaaaagagaaaaaaatgaagaaaataaggaaaaaaacagggattctggattcatagtagggaatgatggaaggggaaattgggtgatcctgcaagcagtgtcgcttaaaagcagactcaaaagaaccgcacaactgaatagctgaaaaatagtagggcaacactaaaaaactactaggctaagaataccttaagcctagcagaaagtgtctagctatccctccctcgctggagatttggtacgtaatgcagagaaataaattatagaaaatcagcttgcttcactaggcaataaaatggtttggcgctgaccatcatcataggcataaacggtttgaggcaaatactcattgtaagcaatcggcagatcgatacacatcccagcacggcgatcatcttgtgaaaaatgaatactaacacggccgtcattattttttacgtgaaaagttaatagattttctaacggaataacgcctttcagatccaagtcaatgatcagccataaactatcgatcaattctcccggcatggtttggacgataccgccagaagcatagcggctgcggctactgtcaaatggttcaaacatggttgttccctccttgaggataaagtcggtcgtgggtcggcaatcgaaagatagaatcaacttgtttaaaataagaccactcctcaaggaatggtcttattctttacttgtagcaaaaattattcttgatcttcaccaataacagctggttctgctgcttcaccgttttcgtcatcttctgaaagttcttgtgcttcagcaacagcaacgatttgttcttcggcttctgtgacgatcgtataatcatcatttttctctaaatcgcctacagtcaacgcgtcaccaatttcaagtccagtgacatcaacttcaatacgttcaggtaatttatctggtgttgcggatacaacgacactgtataagttttgtgtcaatacgccgccggctttcacgcctgctgcatcaccaactaaggtcaattcagcttctacctcagtttcttcattcatatcgactgagatgaattcaacatgggtcaatgcacgagtgaacgtgtctgattgaaattctttgatcagtgtatttactttcttgccttctaagttcatagtgattacggtattcaaaccattttcacgtagcagtctttctaattccgctgcattgactgcaatcggagtactgtctacttgataaccattcacgatagcaggtacttttccttcgtgacgcaatttgttccgtaatgaacgggggcgaacttctcttttcgtaacttctaatgatactgacataactcaattcctcctaaaatttcccgaaaaaaacgggatgtttttaagcaaattttgttaactctgcacattaagtggtacgtgagtaaaaacacgcaaaagggcagttgtttacacaactgccccagaaagttttggttcaacttttctccaccaggtcgtaacgctgtgtatgagaaactttatttactttactctttaaccttacgtggaaagtcgaagaaagtcaaatgaaatgatgagtcgaggatttgcaagcaattaaatctgagctataatagccaagatggagagaaaacaatgcgtatagacaaactgatagaagagcggttagcgacctctcgcaaagaaatgaaacgtctttttcaacaagggaaagtcttggtggatcagcaaatcgaacggaacccatctcgaaatgtcgacagtcgattgcatgaaatcaaggttgctggggtactgctgcaaacaagagatgtgtattacttactcaataagccagcgggggtggtgacagcaaatatagatcaccagcacgccacagtcattgatcttttacagccagaagaccgacaggcgacactttatgcagtgggacgtttggatcgcgatacagaaggattggtattgttgacgacgaatgggcagttaggctatgaattattgcacccaaacaagaaagtgccgaaacgatacgatgtcattgtcaatggtccggtaacagcggaagatgtggctgcttttgctcaaggcatcgtttttcatggaggtgtcgtttgtcagcctgccaaattgaccatagagatgacttcaggtaggcggtcctttgttcatctagagattgctgaagggaagttccatcaagtgaagaagatgtttttagcaagagggaaaaaagtgattgccctaaaaagagttgcaattggtcctttggaactaggggatctattgtccggagaataccggaatctcacccaatttgaattagaaagcctagcgaattattttcgctgagaaagaggagactatgacttataaaacactgttatttgatgtcgatgatacgattcttgatttccaagatactgaacatgaagcgctgacagctctttttgcggaacaaggtctgacgatggatctcgaaatgaaacagacttatcaagaggttaatcacggattgtggcaacaatttgaacaagggaagctgtctagagaccaagtagtcaatgaacgatttggcttattttttaaaaagtatgggcgaatcgtcgacagtgaagcgatggaaaaacactatcgttcttacttggatcaagggcataaattattaggcaatagtcagctagtgttggccgaattggctgacaagtttgatttatatgttgtgactaatggtgtctctaaaacccaataccgccgtttgtcagatgctaagttgatgccttattttcgggatatctttgtatcagaagatacaggttatcaaaaaccaatgaaagaattctttacctatgtttttgaccggattcctaattttgaacaacaaaaaacagtcattattggtgactcattgtcttcagatattttgggcggacatttgtcagggatcgatacaatctggctgaatcctaacaaaaaagcggcttcaacagttctcccaacctatgagatccagtcgttggatcaattgccatcgttattaaaagactgatttcttagaaatgaatagtaatttttcagaatttcgctataatagaaacagtgtaaattttagagacgaaagaggttaattgaatgacgaatggcaagcccattattattggtgtgactggtggttctggtagtggaaaaacaagtgtgagccgagcgattttcaatcactttcccaatcattccattatgatgcttgaacaagactcttattataaagatcaaagcaacttgagctttgaagaacggttgaacacaaactatgatcatccgtttgcctttgataccgatctattgatcgaacatctgcagaaactccttgcctacgaaacgatcgaaaaaccggtctatgattatgtggcacatactcgcagtgaagcaacgatcattcaggaaccaaaagaagtgatcatccttgaaggaatcttgattttggaagacgaacgtttgcgagacttgatggatatcaaactgtatgtagatacggatgatgatattcgaatcattcgtcggatcaaacgagatatggaagaacgcggacgaacgctggattccgttattgaacaatatttgacagtagtcaagcctatgtatcatcaatttatcgaacctacgaagcgctatgcagatgtcatcgttccagaaggcggcgagaaccacgtagcgattgatttgatcacaacgaaagttgcaacattcttaaccgaaagctgagcatcttttctttcgaaaacacttattaaagaatttttttgataaagcagtagtttttctttatcaattatggtaaagtatacctcatgcgacgagtcgagatggtctagctttgactgaccagattgataacagaggcacaaggagcgatccacctgccggatgcagggtgtcggaatattccttttgtggagatagggtattctactagtaatagtactgtgaataaaaaacagctttgaacattcatgttcaaggctgtttttttgtctatttctgtaggggatagcgatagatcatcgattcttctccccaaggatgatagcctgtacccatcagctcaaaaccaaatttttcataaaacgaaacaagatctgtacataaataaagggtcgagaaaccagcagtagcggcagattgcttgatagtatcgatcaaaagccgagcaccaccttgtctgcgatagtgaggatcgacatagagggcgcgcagccaaggcatcaaatccattcggctgataaaatcattcgtgatcagtccaccacagccaatgatcgaggggacagcagcggcttggttatccacgagtaggaaccattgcggtagatcggtatcagcaaaactgtgggtcaagctatcttcatacactttcatggatgcgggactcgcccattttgattgaaaataagcgatcgcttcctgtaaatattcaggatgttctcttaaatgaatgactttcatttttatcccacctttggcaaacggatttgaaaaataacgcctttaggttgtagatcacgtacactgatttgccctttgtgttcctccacgatttgtttggcgatggccaaaccgagaccatagccgccggtttcttttgaacgggagcgatcttcccgataaaagcgttcaaaaatatgtttcttgtcttcatcgctaatagatggacctgtgtttctaacttcgagcagccaatacttgttggaaatttctgacagcagtgtgatcttatctccttgacttgtatatttcagggcattatccaataaaattactaatacttgatgtatttttttggggtcgaagacagcagttgtcgtagctaggttttccaagacaaattgtttattattcattttggcaatctcttgaaacggttttgccagttcttgaatgaaaggagcgatggcaatggtttctttggctaacatctgctggttggaatcgctgcgggcaatcgtcaataaatccgctgtcaatccagtcaacctccgggtctctgctaatgcttgagcaatactttctgattcctcaatgatcgtatgattgggcttagtgaaggtgcgctctaaactgttttggatgatcgtcaaaggcgtccgtaattcatgagaagcattttcgacaaattcttgctgttttttccacgaagcgaggatcggccgcattgtcaatgaagaaaggtagtagctgataccgattgacaagatccaaaagaaaatcatcgataaaatcaaaattgtttgaaagttgttcattgcattattgatttggttggtattggccaacacttgaacataggctacccctgattggttcgtaggcgcggcaaccgtgatcgagtgaaacagcaaagtctccgcttcattttgatcgcttacggtcagtgattgaatcgtatttaaatgttccgtatctaatttgagtgaagctagctgagagaaacgtccgcctaatgattgtttgtttactatcgtaccgtcttctgaccaaagaataaattgggtgttgaaacgattggttccaggaatctttggcattgctgtattgggcggtaaggcaatggcttcgttttgattagcgttgttgatctctgcttggaccagacgtgtatcttggacggcttgttcaagggcaatatcggtttcttgatatgcagattgatcaaataattctagtacaatgattccgagcaatgtaaagatcaatgcaaaagcgctgatattgatcaagaacaatttaagtcgctgtttcttagagagttctttgttcattcgctaatctccttgcataatatagcctacattgcgcagtgtccggatctctttatcaataccagtatcccgaagatgtttgcgtaaattgctgatgtagacctcgactactgtgatcgttgtttctgaatcaaatccccaaatacggtcaaaaatttgctctttcgtcaaaataatgcctcggttttgcaaaaaataaacgagtaatgcaaattcttttccttggataggtaatagcttttcgtcaatcgttacctcattagtagagagattgcaggtcaatcctttatagaccacttggttttcattaaataaacccaatgaacgttttaacaaggctttgcaacgcatcaataattcttcccgataaaaaggttttgtcaaatagtcatcggcgcctttttgaaagccagcgaccttatcttctaatccatctttggcggttaagatcaagactggtgtctgaacagtgtgctgtcgtaattttgccaatacttcatagccattcatttctggaagcatcaaatctagaatgatcaaatcataaatcccactttgggcttcatacagaccttcactcccatcaaaagcttggctgatttcaccaatttctgcaacgatttctttaatattttctgataacgttctgtcgtcttcgatcagtaataacttgatcattctgtcacctctttcattataagcatagcatgagtaacataaaaaaaacttaaaaaagtgatttttgcttaagctgtctttaagtttcagcgtcttaaatagggactatagcaatcaaaggaggaaaataccatgaaattaaaaaaggtatttcaacgaaaagaaaccaagtatcttttatcgtctgagcagtttcagccgtttctgggtgcgttgcagcagaggatgaagattgatgaatatggccaacacacgattctatctctttactatgacacggatgattttcgtttcatccgtcattcgatggataagccaaagtataaagagaaatttcgcatccggagttatggtgttccatctcaggacagtttggtgttcctagaaatcaagaagaaagtcaatggcattgtatataagcggcgtgttcctctaagctattcagattatcaatcatggatacgaagcggggaatttcctaccactattcaaccacttcaaattgccgccgaaattcgttggctatttaaacaaaaccatgacttaagtccgcgcgttttgattgcctatgaccgcctttcgctttttgcatcagaagacagtgaatttagagtgacctttgatcaaaacattcgttatcgggaaaacaatctgacattgtctgaagggagttatggacaattgatagcgccagagattggtgtgttgatggaagtcaaagcaatgggggcctatcccctttggtttgttgaacaattgaatcagtatggtgtgcgcaaagctagtttttccaagtatactcaaacctaccaacgtcatttgtttaaaaaggaggatattcagaatgttatctagtttgttaagtgataccgctactcttgaatgggatggcttgattatttgtattagtgcctcactgattctgggtctcttagttgccggagtgcatatggtaaagaatgtttatacaaaaaattttgtcattacgttggcagtactgccggttctagtacaatcagtgattatgctggtcaatgggaatttaggaactggggtagcgattttgggcgcattcagcttgatccgcttccgttccgttccaggaggttctcgcgaaatcaccagtgtgttttggtccatggggatcggcttagctaccggtatgggttatgtcggttatgtggtggttttttcattcgtggtagctgcctttttattgatgctgtataccgtaccctttggcgaacgacgtaagacgagcgaacgggaattgaaaataactattccagaagacttagattatccccaactgtttgatgacatttttgagaaatttactcatacagccaagttggattcggtacgcacaacaaccatgggtagtctctacgagttacgctatcacttagtattgaaggatcaaacacaagaaaaggctttgatcgatgatgtacggacgcgtaatggcaatttacctgttgtactcggtaaagttgcggctaatcgtgatgaattataaggaggaagaccaatgaaaaaaatctacccattgtttttggcactgttactggtagcttgtgcgcagcaatctgaaacaaattcttcaagttctgccactggaacttcggaagcaacggttacgaatggatctacttctttggaagatacagattattatggaaagtatgaagaagaggatttggatgcttcttatgagtcatcttcagccatagcgataaaactggcgggttcacaaacggaagctggagaaggatttacagttgatgatcaaacagtaacgattacttcggcagggacatatatggtcagcggttctttgacagatggtcagttgaaaatcaacgtcgacaaagaagccaaagttcatttgatttttgctggagtaagtatcacgaatgctaacagttcagcagttgttatcgagcaggcagagaaagtcattacgacattagctgcggatacaacaaatacgttaacggatggaacgagttatacctttgcagaaggagaaaccgaaccggatgctgctttttatagcaaagacgatttgtcgatcaatggagaagggaaattggtcattgaaggcaattatagcaacggtatccgcagcaaagacgatttagtcttggcaagcggcacctatgaaatcacagcaaaaaacaatgcgatcaaaggaaaagattcggtgtcgattcgagatgggaattatactctgacgacttctgaaggagatggtatccaagccaacaataccgaagatgctacaaaaggctatattgggattgatgggggtatatttacgatccaaagtggtcgggatggtatccaagctgagacaaatcttagtattcaatcagcagaaatgaccgttaagacagctgatggtgcagatagtcaagcggtcgtcgctgatgaaagttataaaggaatgaaagcaggtggatccatcctactagcaagtggttcctatactatcgatagtgcggatgatagtatccacgccaatgattcagtcaccatcaatggcggggagatttcagcagcgactggagatgatggcattcatgcagacaatggtttaaccattaatgatgggacgattattgtcaacaaatcctatgaaggcttagaagcaagcgtcatcaccattgctggtggagatattcaagtgctagcaagcgatgatggggtaaatgccggcggcggcagcgacacgacggacagcggacaatttggacaagatagttttggaggaggaccaggcggtggcgatcaagcagacgatagcaaagaagttgtcatcacaggtggaaccttgtcaattgatgctgaaggagatggattggacagcaatggcaatgtcacaatgagcggtggaatcgtgattgtcaatggaccgacgcaaggcgggaatggcgctttagattataatggaacctttgaaattacaggtgggaccctcgtcgctgcaggaaccactgatatggcaatgaatgtgagtggcggaacacaacgatcagtggcgattactttcgatcaatctcaggcagcagacacgttgatcaccttgcaagatactgagggcaatacgttattatcctatgcacctagtaaggattttcaacatgtggtgatttcaagtccagatttacaatcagcagactatacactacttagtggcggcagcaatagtgaaacttctgtttatggtctttatcaaggaggaagtgtgaaggatgcttctgaattaggcacattatctttaacagataccctttcaaatttgactcaatctggcgcaactgccacgacaaaccaaatgggcggatttggacgctgatcaattctagtagccctcgttggaggaaccaaagaaagaatactacgaacgatgaccgctacaacttagtttattcttgctatacatgattggtaaaaagccattaaagtgtaacattctgaaaggatattctagccctccatttccgagattgaagcagacagtgtctaaagatatcgtggatagaccatgcctattttaaggtgtacttaagctagtaaacatatagtcaagctacgtttagtagaggaggatatgagatgaattttatgaaacgcggcttacaaagtttgtgggcaaagaaaggtcgaagtttgctgctaattgctgttttttcggcaattttgatttttgttttagcaggattgacaatccgcagtgctgctttagtcgcaaccgaaaacgcacaaaaaagcgtgggagcgacggtgacgctgcaagccaatcgggagtctcttcgacaaaacagccaaacagcttcttcagatacttcagagggggagtcgacaccgcccgatccaggcagtttccagaatacaccggtaaatcttagtgatgctcaagcaattgcagcgttaagtggggtagcatcctatagctttgaagcgagtacatcagccgatgctgtcagtggcattgaagctatttcaagtgaggatgacgaaagtacagcgacagaatctacggaggattcatctagagcaacgaatggccagccaagtgggatgcctaatatgcaaggaggcagaatgagcagcggcgattttcaaatcactggtgtttccgaaagtacgaactatacaagtttttcagaaggcaccgcgaaaattaccgatggtgaagccatcactgcaggagatgaagggacgaatcatgtcttgatcgaatcagaattagcagaagcaaatgggctttcagttggcgacaaatttgttatttctgatagtgaagacaatgaagtcgaagtaacgatcaaagggatctatgaaaccagtgaagttgggaacagtatgagccaaatgttcaattttttgaacccagccaatacattgtttgcatcctatactctcgttaatacattggcgggtaatgaggatacgttagattcggcgacttatacgttgagtgatccttcagaaatggacagtttcgttgctcaagctgaaaaactgattgataccgatacctacagtatccaaacgaatgatcaaatgtatcagtcgatgttgacaccattgaataatgttgcaagttttgccaaaaatataattgtgctagttgcggttgccggtgtcatcatattgacattgatcgtaatgttgtcgatcagagaacgcaaatatgagatcggcgttctgttatctttaggcgaatcgcgaataaaagtcattttacagttttttaccgagattgctatctgtatgttctttgcattgggaatcgctgcagctagtggcaatgttgtagggaatatcgtgggcgagcagctgttggctcaacaaacgacaacggaacaagcggacgcagggatgaatggtccggaaggaatgccaagtatgggcaacggcggtcctaatggcagaagcgggctatccgcttttacaccctcggcagaagtacaagagttagctattacggtttcattccaagaaatcggcttattggcattgttaggtgtagggatcagctttgggtccattctattatcttcagctggaattttgcgcctcaatccaaaaaaaatattggtttcctaggagggatagcatgacgttacaaacagaaaaattaggttattggtaccaaacagaatctgaagccctttttcgagaagtagatttgacctttgattctggaaaaatgtacgcgatccttggttccagcggttctggtaaaacgacctttctctcattaatcacgggattggacacaccaaaagaagggaatatttattacgataacgaaccgttgaacaaaattggattgcgagaataccgtcgtaaagatgtttctatcgtctttcaagcttataatttgttgccctatatgtcggcactggataatgtgactaccgcaatggcgattgccaagtcacaacaaacagataaaaaggcatatgctttggcaaacctggctaaagttgggataactgaagaattagctatgaagaaagttacccagctttcgggtggacagcaacaacgagtggccatcgtccgggctatatgctgtgaacatgagttgatcgtggcagatgagcccaccggtaatttagatgaaacgacctcaaaagatatcgttcaactgtttcaagaaattgcccatgaacaaaagaaatgtatcatcttagtgacccatgaacaagaagtagcgaaagtctgtgatgttgtttatgaactaaaagagcgtcaatttgtcatgcgggactcctaataaacttgttactgaaagactaaactcaaggctgtattttctcatcagagcggatacagccttgtcttgcatcttgcagcagaaacttctacaataaaaggaagggggcgagacgatgcgattactgatcgatggggatggttccccagtaaaaaacgaagtcattgaattaggtgcgcagtttgcattgccagttgtgatcgtcactagtgtcgatcactatacggccaaagaatatcctgattttgttcattttgtctatgtggataagggggccgatcgagccgactatgagattgttaaagaaattcaaccgggcgattttttagtcacacaagattatggcttagcttcacttgtattaccaaaaaaagcccgtgtttttcatcataacgggacagaatatttgccggagactatcgactttttattagggcaacggtatttaggaacacaaatgcgtaaagccgggaagcggaccaaaggaccgaaaccattcacgaaagaggatcgtcaacaattcaaacaagttctagagcaagaaattaaaaagacgatccagcagtaaccatcattgaggagactgctggatcgtttatttttttcgaaaacgatcataaaaatattttccggcaacggtgacgatggccacaaaggctatacaatagccaaagatacccatttgatgaacaaagctgccctgttggggacttgcaacgactaaaagagaggaacctaaaatcactgctgctaagataatgccaatcactagccgattgatcatttgatcaaaacggtccagcagctgtttttgatggcggatctcaatattcagacgatgcttgccagtagctagtgtgttgacagcagctaatgttcgatcagggagtcgactgagtgctcggagacttttggcactggctaacaaactttttttcatttcttcttcaagatccagctgctgcaaaaagtatttctgagcaaatggctgtgtcacttccatcatcgataattgagggtcaagtgcctcgattactccttcaagcgttccgaaagctttaatcagcagcgtgatgtcacggtgcatctgtagatgattgtcatgacagatagtgatgacttcagctaatactttttgcaaatcaatatctttgatcggcatgttgtaataattttcaacaaaagactgaagatcttgatagaaatccacttcatcgaagtttctttcccgacggcaaaggcgtaggacagctctaccaacttgttgggtatcttgagtgtacaatgcgatcaaggcatctgccagccgactgcgaagggtctggtccagatgtcccatcattccgaaatctaaaaagatcaagcgataaggcggcagtgtctcctcatcctgccattttaaggagtaatcaacaccgcctaaaacaccaactttcttttttacatggaaaggagctgtttgctgatcgggatccagtggttgcaagaagatatttccaggatgagggtctgcatggaaaaagccgtcttcaaagacttgcttcataaagttctctaccagcagggtaccgacctctttcttgatttcttttactgtccggttgggaaaaaattgttcattgttttttcgagcaagcaaacagtttaggttttctccttccatatagtccatgacgatgactttacgtgtacaccactgaggatagactttaggaatctcgatctgctgccagtggtgattgaagtgataaaactcttgcgcatttttcgtttcttgcagaaagtttgtttcattatccaatgagcgtcgaacttcatgcagaacgcttttaagatccaccacattcgtttctggaatatagcgaatcaaaggaatcgctttttcaaacaaatcgagatctacttggatagcggaaataatgccgggatgctgtactttgacaacaacttctttgccatcttttagagtcccacggtgagcttgaccgatagatgccgaagctaagggcttttcttgcaaagttgtaaaaatggctgtcagaggttgttcccattctgcttctaacagcgcctggacttgcggaaaaggatcgcttttgacattgtcttgcaagtgtttgaattcattgataaaagcgtcagataataagtcgctacggacggaaagcatttgtccgattttaatgaaggtgggtcctaattcttcaaaggctttgcgtacagcgaggggatcttgctgcttacttaaattttgaatcactttgtatttgagaaacacttgaacgatctgtctgagtctttttttcttagatggtgattcctgttccatacgggcacctctattctttaagtttcgctagtctaatagtacgaagaaatcaagaaacattcaactacggatgatttcagttgttaaaatcggcaagaaataatgtcgcagcttcgtttttgtgctaaaatgtggaagaattagttttggtagaaacaatgaatacaggaggaatttcttttgaaaattattttattatatggcggacgcagtgcagagcatgatgtatcgcttctatccgctttttcagtagtcaatgctgtatattataattactaccaagtacaattagtaatgatcacgagagatggccagtggctaaaaggctctttattgactgaagcccctacatccaaagaagtgttgaatctgacggattcggcttaccaagggacgccgatccaacctggtgagatcaaggaagaggatgcgattgtttttccgctgctccacggaccaaatggagaagatggaacgatccaaggttttctagagaccatcggcatgccttatgtaggcgcaggggttttaactagtgcctgtggcatggataagattatgaccaaatatatcttgcaggcggcggggattccgcaagttccttatgtacccgttcttaaaaactattggaaagaaaatcctaaaaaagtatttgaacaatgtgaaggcagtcttttgtatccaatgtttatcaaacctgccaatatgggttcaagtgttgggatcacaaaagctgaaaatcgggaagaattgcaaaatgcacttcaagaagcctaccgttatgatacacgagcgatcgtagaacaagggatcgaagctcgcgaaatcgaagtcgctgttcttggaaatgaagatgtgcgtacaacaatgcccggcgagatcgttaaagatgtagctttttatgattacaattcgaagtatcttgacaataagattgagatgcagatcccagctcaaattcctgaggagacacaagcgaaagcgcaagagtttgccaaaaaagcttatacgatgcttggaggaagcggcctcagccgctgcgactttttcttgacgaacaaaaacgaattattcctgaatgaattgaacacgatgcctggttttaccgagtttagtatgtacccgctgttgtgggaaaaaaccggtctgccatatggtgatttgattgaggaattgattcaattaggagtcaaccgttttaaacagcgtcaagcctttttaaccgatgtcgaataatcacaaatagggaaatcagttcaactcaaggtgaagcttgaaaggaccatgatcttccctgtttttaacttaaggagataaataagatgaatctatcgataaaagaagttgccgctttatttggcgtagaatgtgccgatcagacaatgatcagcagtgtagaatttgacagccgcttggtcactaccgatagtttgtttgtgccgttggccggaacgagagatggccatgagtttgctcaacaagcacaagaaaaaggagcaatcgctgctttttggagccatccgacaatccagccgccagaaggactaatgatcatcgaagtatcagacaccctagctgcctttcaaaagctggcaaaattctataaagaaaaactggcgccaaaagtaattgctattacaggtagcaatggtaagactaccacaaaagatatggtagatgcggtggtggcacagcagttcaaaacctacaaaacacaaggaaatcacaataatgaaattggtttgccactaacgattctgcatgcaccagcggatacagaagttcttgtattggagatggggatggatcatgcgggggaaatcgaggtcttgtcacacttggctcagccagatgttgcagcgatcacattgatcggtgaagcccatattgagaatcttggttctcgtgaaggaatcgcgaaagccaagatggaaatcactgccggcttagacccagcaggatttttcatgataccagcagacgagcctttattgaccccctaccttgcagagttgactcagcaggtagaaacatttggtttgggtgaaggcaatcttaaaggaacgatccaagaagaaacccaagaacaaacagcttttacggtagcggatcaagtctatacgattccagtgatcggcggctacaatgtaaagaatgccttgatcgcgattggcatcggtcgttatttggggattgaagaagaaaaaatcaaagcaggattggctgattttcaactgacaaagaatcgtacacaatggctgaaagctgcgaatggcgccgctattttaagcgatgtctataatgcaaacccaacagcgatgggattagtcttagacagtttcagaaaattgcctctgactggcagacggatcgctgtgctagcagacatgttggagttaggtcctgattcagcgaagatgcatgccgcgatggcggatcatttagatgaaaggttcgatttgatctttttgtacggtagtgagatgcaagcgttgaaacgtgcattggatcaaagccgcttagccgatcgagtccatttctttagcaaagaggaaaaagcggcgctgatcacacaactacaaaaagaactgcagcctacggatagcattgttttaaaggggagcaacggaatgggcctggttgaggtaattgattctctaacagcaatgtaaagtaagcgtgaaatcttgctgaaattttcattctgtgctatacttatttaatgccgaaagatgaagcacagaatgattactgtaaataaacattgacgttttgagataaaatgatggctgagacagaaagatttgttttagccttttataatgccttcgtgaagcggtttttcggtaacaagagaaagataagagatgggactgctcttgtgtttctgaagaaagtacgcttcgattaaagaaaacaggcatcatgatgatgaccaaattaggaggatccatttgaaatttaaagatctagaattatcaaacgaattattgacttctgttgagcgtgccggctttgaagaagcaacaccaatccaagaagcaacaattccccttgcgttgcaaggaagagatgtcatcggtcaagctcagaccggtaccggaaaaacagcagcattcggcttgccaatgttggaaaaaatcgacccagcaaatcaccaactacaaggattagtgattgcacctactcgggaattagcgatccaaacccaagaagaactatatcgtttaggaaaagacaaaaaaatccgggttcaagcggtttacggtggtgcggatattggtcgtcaaatccgtcaactaaaagatcgtccccatatcgttgtcggtacaccaggacgtatgttagaccatatcaaccgccacacattgaaacttggcacagtggaaacacttgttttggatgaagcagacgaaatgttgaacatgggcttcttggaagatatcgagaagatcatcagccaagtacctgaagaacgtcaaaccttactattttcagcaacaatgcctcctgcaatcaagagcattggcgtaaaattcatgaaaaaccctgaacatgttcaaatcaaggcgaaagaaatgacggctgatttgatcgatcaatattatgttcgttcaaaagactatgaaaaattcgatattatgactcgtttgttggatgtacaaacacctgagttgacgatcgtttttggtcggacaaaacgtcgtgtcgatgaattggcacgaggactagaagctcgaggctacaaagcggaaggaatccatggagacttgtctcaacaaaaacgaatgagcgtattacgttcattcaagagcggtcatttagatattttggttgctacagacgttgcagctcgaggattagatatttctggtgtgactcacgtctacaactatgatattcctcaagatccagagagttatgttcaccgtatcggacggacgggccgtgcaggtaaaggcggaatctccgtaactttcgttacaccaaacgaaatgagttatttgcatgttattgaaaatctaactaaaaaacggatgtcaccaatgcgtccaccaaccgaaaaagaagcttttaaggggcaattaggtgcagcaattgaacaagtagaagtgaaaatggatgaaaacgggttggataaatacctccaagctgcagatgatttattggaacgctactcagcacaagacttggctgctttgcttcttaaaacaatcgcgaaagatccatctgatcttgtccctgtgaagatcacaccagaaagaccattaccgcaaggaaagaaatctttcaataaaaatggtcgtcgcagcaacaacagcaacaaccgcaaccgtaaagacaacggcggcaaccgcagcggcaaagctcgaggaaattacagcaaagacggcgctcgcaaaaataaccgtcgcagcaatgacaaaaaacgcggcttcgttatccgcaacaatcaagactagtccttagaggtcgctttcagcacctttttcgacacaaaattatctgaacttttttcgatcaacctgccaatgtgtgccactgaccaagaggccacttggcgtgatcgatcattgttcggatattttttttgccctttttgagaaaagacggtatagtcaaggaaaactggagaacgagcctctcaaaaatttcttaaccatccattaaaccctttagttttgagtggtaattccctttttttttggtagaatgaaactaaaataaatgcagctgatgtattaaatagatagatataaaatcgtaatgaacagtcatggaataaaggttcttgctgaacagaaaaggatagaaaatgatcaaaggtatcgggatcgatgcagtagaattagcccgcatcaaagaattgattgaaaacaaaccgcaatttattcagcgtattttaactgagaaggaatctgaactgtttttcaagctgccaaaaaaaaggcagattgaatttcttgggggacggtatgcttgtaaagaagctttttcgaaagcttggggaacaggaattgggaaattgtcttttcaagatatcgaagttctgaccaacgaggctggagcgcccgttgttacaaaggcacctcaccctctacatcagacgtttgtcagtatcactcataccaatgagactgcctttgcgcaaatcttgttggagaatgaataatgccagagatagcgattcgttaagggaatcactagagaaagaaggaaagtggaatggtcgtttcaatccatagaccaacgaaagccattatagatttaaaggcaatcaaagaaaatgttgaaaatgaagtggcgcgtttgccaaaggcaacggatttatttgctgtggtcaaagcaaatggctacggacatggggctattgagacagcaacagcagctctagaagggggcgcttccggtttttgtgttgcgacagtcgatgaaggtatcgagttgcgggaagctggattcagtgaaccaatattggtgttggggatcgtttctgtggcagatatcggtttgctgagctactacaatctttcatttccagtaagtacgaacgagtggttgcaagaagcggctgctttcttgcaaaaaaatcctgtcaccaatccgctgaaggtccatttgaaagttgatacaggaatggggcgaattggctttatttctaatgaagagttactctcggctgtcaaatggctccaagagcagtctttgttcacatgggaaggggttttcacccattttgcgacggccgatcaagcagatgatacgtattggcaagaacaaaatcaacggtttcaaaccgcattggcatgtctgcctgaattgccaaggtatgtccatgccggcaatagtgctactgctttgtggcacgcagaagccgtagggaacatggttcgctatggcattgcgatgtatggattgaatccttcaggaacggcattgccagaaacatatccattgaaaccagccttgtctcttgtttctgaattggtccaagtgaaattacttgaaaaaggagccggaattggctatggtgaaacatatatcacgccgcaagcagaatggatcggtacggtaccgattggttatgcggacggctggttgcgaaaaatgcaaggattttctttattggtagctggtgagtattgtgaaatcgttggtcgtgtatgtatggatcagctgatgatccgtttaccccggtcatttcctgcgggaacaaaagtcacattgatcggcgaagataacggacagtgcatcactatgcaaaaggtagcggaacaattagagacgattcattatgaagtggcatgcacgctttctgcaagggtgccgcgagaatataaaagttagggtggtcctatggtaaaaaggggagacatttattttgccgatctgtcaccggtcgttggatcggagcaaggagggattcggccagtattagtgattcaaaatgatttaggcaatcattttagtccaacggtgatcattgccgcgatcacggctaaaatggctaagccaaaactgccgacccatattgggatctcagcgacttgtacagggattggtaaagattcagtgatcttgatggagcagattcggacaatcgacaaaagtcgactaaaggagaaggtttgtcatctagatgaatcaatcatgtgtgaagtcgatgcggcattaatgatcagtgtgggagtcgagacggcttattccacgtcgtcgattcattcatgatgctaggatatttgttattagcggcaacactgatactatttttattttatacttatcaacacttgcggcgctttttacgggaaactaaaaagaaacaagaagacgttgaaaaagggtattttttattgagccatacatatgaagatcaggaaaaagcaagttactatggtgtctttcagcaaggagaaaagacattgacattggagatgccattgcagctttacctgcacacaagcccaccgcaacgtggcgaattagtcgcgaaagatggcaaagtcattgaattcaatacgtgaatacaaaaaaactttccatcactatatgtgatacgtgaggaaagttttttgcattagcagggaaaattttagcagaaacgataaattaggaaaaagagcccagtgtctagaacaagatcgttcagtcttttatctttttttatattctgagatcagagtgttgcattcgtaattctactttcaacaagcctcggagatgagttgctttatacgcaaaattcagttatagtatgtagcgactattttgaaaagaggaagcaatgtgaaaccttcaatttatggattaaccaaagagtccttatctttgtggatgactgagcaagaagaaaagaaattccgcacgaatcaagtgtgggaatggttatatgagaaacgagtagcgacatttgaagaaatgaccaatttgcctaaatcattggtaactaagttaaatgaatcgtttgtgatcaatcctttgaaacaaatcgtcttacaagaagccagcgacggcacagtcaaatatttgttccagttacccgataatcatatgattgagaccgtcttaatgcgtcaggaatatggtatgtcagtctgtgtgacgacacaagtcggctgtaatatcggctgtacattttgtgcgagcggtctgctaaaaaaacaacgagacctaactgctggagaaattgtcgctcagatcatgctggtgcaacattatttcgatgaattgaatgctggagaacgtgtctcccatgtggtggtgatgggaatcggcgagccttttgacaattacgagaatgtcatgcagtttctgcagattatcaatgatccgaaaggactagcgattggtgcgcgccatatcactgtttcaaccagtggtttagctcataaaatcaaagagtttgctgaaaatggcttacaagtgaaccttgcgatttcactccatgctccaaataatgaagtacgaacttcgatgatgcggatcaaccgcagtttcccgattgaaaaactaatggaagctattgactactatttggaaaaaaccaatcggcgaatcacgtttgaatacatcatgctggatcatgtcaatgatcgaccagagcatgcgcggcaattggtcgaattgctcaagaataaacgcaagctttcttatgtgaacttgattccttacaaccctgtcagtgaacatgatcagtatgctcgcagtaagaaagaagatgttttagcattttatgacatcttgaagaaaaatggtatcaactgtgtgattcgtaaagaacatgggacggatatcgatgcagcttgcggtcagttgcgcagcaaacagatgaaaaagcaagtcactgcctagaaacaaataagtctgaccatgaaggcgggaaagtcgctcattgaacagacttttatcaaaaaacggtacaggagaccgttttttcaaaatcagaaaagtaggtgaacggcactctttgttgacagaccgctgaaaaaggccagctctgagacaaagacgggtgcggttcctgcttttgctgatttttttatttcagaaaagaactgttttggataacaacaaaggaaagcgatttctctggattttttcaaaattccgatactcatggcttgaaaaatcgtctatactataagaattgatagaaataaaaataacacacatgatgaaaggatgattccatggaatggatcaaattgattggtattttggtaattcttgtcggctttttgctgaaactcgacacgatcgccgttgttctgatcgcaggattagcaaccgcattagtttcggggatagattttactgatttcttatcaatgttaggaaaggcatttgtagacaatcgtctcgtgaccttattcctactcacactaccaatggtaggaatctcagaacgctttggattgaaacaacaggccgttgttttgattgaaaaaatcaaaggattgaccccaggcaagtttttaagtttgtatttgtttattcgagaactagcaggtttcttctcgattcggatccaaggacacacgcaatttattcgtccaatcgtaaacccaatggcgcaagccgcagcggagaacaagtatggcgaactagaagaagcagatcaggaaaaaatcaaagctcgggcggcagctaatgagaactacgggaacttttttgcccaaaatacgtttgtggcggcttcgggtgttttattgatcactggaacgttaaaatcattgggttatgacgtagccgccagtgcaattgcacaggcttcaatccctatcgcgctgatcgttttagtcattgctaccctttcaaatctggctttcgatcgcaaaatgtctaaaaatatggcgaaaaggaggaaaagtaaatggaagcaatcatcaataatattttagaattcttttatattttgatcggtctcttgtcaatcatgactgctgttcgagtctttaaagatgcgacccatccaacacgactgggtacagcaacattttggcttttacttggtatcgtttttgctttcggaaactttattccttacatcattgatgggatcatcattatttgtatgggcgtattgacgttcttcaagcaagttcgaattggtaaaatcgtggatgtcgatgaacaaaaagcagaacaagccgccgaaagaatcggcagtaagatttttatcccttgtatctcactagcagtcatcgcagttgcgatttcctacacacctttaggcggacaagttgggatcgggatcgcttctgttttggcgttgattttagcaatggtattgacctctgctaaaccaaaaacagtgctggatgattccgatcgtatgttccaacaagtcggtactgctggtatcttgccacaattactagcggctctaggcgtgatttttaatgctgctggtgttggagaagtgatctcccatggtatttcaggtgtagtacccgaaggcaatcgtttgattggtgtgattgcctattgtttaggcatggttttatttacaatgatcatgggaaatggctttgcggcatttactgtcattactgccggaatcggtgtcccattcgtaatcgctcaagggggagatcccgttgtagcaggagcactggcgatgactgccggtttttgcggaacattgttgacaccgatggcagccaatttcaatgcattacccgtcgcattactcgagatgaaaaattcgaatgcagtaatcaaaacccaagcaccgattgccgtgctgctaattgtgatccatatcggattgatgtacttttgggcattttagtggtaaaaaggaatagaaaggatgatcaatatgaaatgtttagtcacaggatttgatccatttggcggagaagaaatcaacccagcgttggaagctgttaaattattaccagaagaaatcaacggagcaaagatagttaaattagagattcctactgttttcggcaaatcagctgaagttgtacaaactaaaattgaagagatccaacctgatgttgttttgaatattggacaagcaggcggacgttttgctatttcacctgagcgagtggcgatcaatgtcgatgatgcacgtattccagacaacgaaggcaatcaaccagtagatgaagccatccagcctcaaggtcaacctgcttatttcagtcagttgccgatcaaagcaatggtagctgcgatgaaagaagccgggattcctgctgttgtttcaaatactgccggtacatttgtctgcaaccacatcatgtatcaagtacaatacatgatcgatacaaaatacccaacgcttaaagggggcttcattcatgtcccattcgttccggagcaagttgttgacaagcctggtcaaccggctatgagcttacaagatattgcgaaaggattggaagcggcaatcggtgcgattgtcgattatcaaggaaaagaagacatcaaagcaatcgggggcgccattcattaagcggcacgaacagattgtcaattaaaacgaattgatttaacgatagatagatcagacaactaggaatataacttgtaagaggataggttgcttgcgagaataggccgatgttgtctgatcttatttatttcaagtaacgagcaagtatgaagcgcggaaagtcatttattcgtctttttatcgatttattgatagaattcatctagtggaacacgcgaaatgcgaagggggcaaatcatgatcattactgaatttgatagagagaattatattttacgtgatcagctgatcgacttagccgttctaatttatccgtctacctatcaaaaagagcagcggacagcagaagaattactgcagccgaataaagttgtcattgcagctattgaaggagagcaattggtcggctttgtgagtgccttccaaaaaagcgacactatctggcagcaagagatcagcttagttgatccccgacatccagatgaacaaataggtgagcgtttgactgcctttttgcgagacgaagttgttgctgctggcggagaatggctagtttcttaagtcttctagttgaacattgcttgtcaaaacggacacagacagttatagtggccaagatgtttcttaaaactagtcaagagttggaacataagttgaaacaaatgatatccgaatgatcaaaaatgaaggtcgcaagaatcatcaagattagcgacaagacacggctgtaaagtgagtgtctttcattgattgttcggatatatgcttgttttttgtaacttatgacacaactctttttgttttttttaaaagaaaaaatagtctttaaaataaaaatgagaagaagatgaaagtagcatatttattagttttctagtaatatttagtagaaattcttcaaagttattgtcttttatcgtgttttttaatgctaaaaattgtaaaaaaagattgcttttttaataattattaattaaaatctaatctaacttcagaaaagagcgattattctgaaaattaaatcaattaaggagtagttcaggatgaaaaataaatgggcatatggattggttgctgtgtgcggcttagttttagcaggctgtaccacaggtggttcaaataattcaagcagcggatcagctgccagcagcgaaagcaatgcggaacaggtattcaatgttgtggttcaacaagaaatgccaagtgccgatttgtcccttgcgacagatacaatcagtttcagtgcgctaaataatgtatatgaggggttgtaccgcttagacgctgacagcaaaccgcagccagctggagcagcagaagaagcagaagtcagtgaagatggattgacttataagatcaaattgcgtgatgacgcaaaatggtcaaatggcgaacctgtaacagcagctgattatgtctatggttggcaacgaacagtcaagcctgagacggcttcagagtatgcctacttgtacgcaccagtaaaaaatgcggaagctatcacagccggagagaaagatccgtctgaattaggaatcaaagcagttggcgatcatgagttagagatcacattagaaaaggccactccttactttgactacttgctggcattcccatctttctttccgcaaagtcaagcggttgttgaagaacacggggatcaatatgcggcaacgagcgacaatgccgtttataatggaccttttgttcttaccggatttgatggaccaggaaccgataccgaatgggcatacgaaaagaatgatcagtattgggataaagatacagtgaaattagaaactatcaatgtgagtgttgttaaagaatcagcgactgcattgaacttgttccaagatggtcaagctgatgatgtcattcttacaggggaacttgcacagcaaatggccaatgatgaagcgtttgtctctcaaccagaagcaacgacctattattttgaagtcaatcaacgcgatgaaaaatcaccattccgcaatgaaaatttacgtaaagcaatttcgtatgccattgatcgtgacgctttagtgacatcgattttaggggacggctcaattgcttcgacaggtctagtaccagaaggcatgacctttagcccatccgacaatactgattttactaaatcagcaggcagtgttttagaatatgatgaggccaaagccaaagagcattgggaaaaagctaaagaagaattgggaatcgattctcttgaatttgatatcttagcctctgatacagattctacgaagaaaatcattgaatatgtacaagatacattgcaaaaaacattggatggtttaacagtaacgttaagccccgtaccattctctgttcgtttggatcgttccaacgctggagactttgatatgttgatgggtggttggggagctgactatgcagatgctagcagttttacagacttattcacgactggcaactcatataaccgtggtcaatggagcaatgaagagtatgatgccttgattaaatctgcaagtacgactaacgtcaatgacccagaaaagcgttgggaagatttagtcaatgcggaaaaactaatcatgagtgaacaaggagtaatcccagtttaccaaaaagcagaagctcatttacgtgcaccaaatgtaaaaggtgtcgttgctcatgcagcaggcgcacaatacgattacaagtggacatcgattgaataaccacttgaatgcctagcggctgggacagtaactggatacaagatgacgattatcgatgaatagctggaataacaggcataacaaaaatggagaagctgctgcttctccaaaatgccaagtgcttcactatttgtcacgtatggaaatcttctcttgaatacagtctcagccggcttttttttctaaagcagaaaggcagtcgacaaaagacacaaaacgataggttactaaattaaagagtattgattaataaaaagagcaaagaaagtagcagtaaaaaaattcctggccatagccaaaagccgtagctttgtttaccaacatcggagagtttaaggtaatcggttttatttttggaaaaagcttttttcattgaatattggaaatgatcaaagaacccagaggcaaagacccaaagaaaaccgccgatgatcaagaagaataaagcccaaagaaatagtgcatccgagatagttgacagggtcaattcctttttgaaaaacaaccagctaatggaaataagggtacatatgagggcgatcagcccactacttttttttatccgcataagttgactcctttttaatgattcgtactacttaatttacataattattgataagaagtcaaaatacctagggggaagacgcgtgaacggttttttgaaatatttattgaaacggatattctatatggtattgaccttatggttgattgccacgatcacatttttcttaatgcaatttttaccaggaacaccttataccaatgcagaaaaactgagtcccgaacagattgccttattgaatgaacaagcaggtttagataaaccgatgattactcaatatgggctgtatttgacgaatttagttaaaggcgactttgggatttcattccaattcaaaaatcaaccggtagcgaatctattatctggtcggattggtccttctttacaattggggctgcaggcaattatttttgggacttttttcggtatcattttagggacgatctccgctatgaaacaaaatacatggattgatacgacgtcaacgctagtagcgatcttgggacgttcgattccgaactttgtctttgccgttttgctgcaatacatttttgccatcaaattaggtgtcttgccaatcgccaaatgggaaacttttgcaagcacgattttgccaacgatcgcattagccatgtcgccactggcagactctgcccgctttattcgaaccgagatggtcgaggtgctccacagtgattacgttgagttggctcgtgccaaagggctgagccgctgggagatcgccttcaagcatggtttgcggaacagtttgatcccgctgcttaccttgttaggacctttagccgttggattgatgacgggttcattagttgttgagaatatttttgcgattccggggattggcgaacaattcgtaaaatcaatcatgacaaatgattatccaacaatcatggcagtcacgattttgtactctgccatgttagtatttgtgattttagtggtagatattttgtatggtatcgttgatccgcgtatccgtgtgtcagaagggagccgtggctaatggaagagaaaacaatcaatcaagtagctgccattgatgcagccaaatttcagccgttacaaaaaaataccaaagaagaacgagaagcaattgctgcgccatcgctgacctttttccaagattcatggcgccgtctgaagaaaaacaaagcagctgtattttcgatcgtactattgctgatcattattgcaatctcgattattacgatctttgtttctccccatgaccctactgcgcaaaacgtgaagttcacgaatctgcctcccaaaattcccggactcaatctcccaggattaaatgggtatgcaatggttggtggtgaattggttgataaatatgctgctgccaatgttccagaaggcacttactatctactaggaaccgacggactaggacgagatctgttgagccgtttatttgtcggaacgagaatctcgctattgattgcctttattgccgctttgctagatatcatctttggtgtgacctatggattgatttccggtttattagggggacgagtggataatatcatgcaacgtttcttagagatcctttctgggattccgaatctagtggtgatgattttgatgctggttgtcttcaaaccaggaatcttttcgatcgtagctgcgatggctatcaccaactggattccaatggctcggattgttcgcgcgcaaacaatgaaattaaaagatcaagagtttgtgctagctgctacgacattaggtgagagccgtatgaagattgcgatgaagcatatcttgccgaatatttcgagtgtgattattgtccaaatgatgttcagtatcccatcagcgattttcttcgaggcttttctaagctttatcggtttgggcttaaagccgccttcagcatcgctagggatgttactgagcgacgggtacaagacctttttattcttgccttaccaaatgtgggtgccggcggttacgttgtcggtcattatgatcggattcaacttacttgctgacggactccgtgatgccttcgatccgaaaatgaaagagtgattgctatggaaaaagtgttagaagtgaaaaatttagagatctcctttgatacctttgcagggaaagtccaagcgatccgcgatgtcagtttcgaactatacaaaggcgaaacactagcgatcgttggcgaatccggtagtgggaaatcagtaactacccgcagtatcatgggattattagctagtaacgccaatatagataatggagagatcctattcaatggaacggatattctcaagaaatctgagaaagaactacaaaagattcgcggaaaagaaattgcgatgatcttccaagatcccatgacttctctggacccgacgatgcccatcggcaaacaagtggccgaatctttgatgaaacataacaaacttagtaaaaaagaaggactccgacaagccttggatcttttgaatctggtagggattccgaatgctgagaagcgtttgaaaaattatccgcatcaattttcagggggacaacggcaacggatcgtcattgccatcgcattaatctgttatccacagatcctgattgctgatgagccgactacggcactggatgtaacgattcaagcccaaatccttgagttgttgaaagatatccaacaaaaaatcaattcatcgatcatttttattacccatgatttaggagtagtagcaaatgtggcagatcgggtagccgtcatgtatggcggcaaaatcgtagaggtgggaacagcagaagaaatattctataatccacagcatccttacacttgggggctgttaggttccatgcctaccttggaggggacgggggatcgtctgtatgcgattcctggctcaccaccagatttgttggatccgccgactggggatgctttttatcctagaaatgagtttgctttgcagatcgatgccgaacagcaacccccattctttgatgtttcaccgacccataaagcagctacgtggcttttagctccgcaagcacctaaggttacccctccggatgaaatcttgattcgttggaaaaaattccaagaaaaaactagacaggcatctgtataaaggaggagaacccattggagaaagtgttgcttgaagtaaagaacttaaaacaatattttaatgtcggtcgcaaagacgaagtcaaggctgtagatgatatctcctttcagatctatgaaggagaaacctttggactagtaggagaatccggtagtgggaagtcaacgactggtcgaacggtcattcgactgaatcatcccacggcaggagaaatcttgtttgatggacaagatgtcatgaaaatcaaaggcaaaaaagatttagctgatttccgtcgagaagtacaaatggttttccaagatccgtatgcatcattgaatcctcgaatgaaagttcgcgatatcattgctgaagggatcgatatcaacggattggcaaaaaacgaaaaggaacgcaaccagcgcgtagatgatttgttgaaaactgttggtttaaacccaagtcatggaactcgctatccccacgaattttccggaggacagcggcaacggattgggattgcccgagcactagcggtagatcccaagttcatcatctgtgatgaaccgatttcggctctggatgtttcgattcaggcccaaatcgtcaatttgctgcaagatttacagcaagaacataagctgacttatctattcattgcccatgacctatcaatggtcaaacatatcagcgatcgcatcggtgtgatgcataatggtaaacttttggaagtaggttctagtgatgaaatctatcattatggggtccatccgtacacagagagtctcttgtcggcgattccactgccagacccagatcatgaacgagaacggaagcgcatcaaatacgtcagcgaaccaacagatgacaagcctcgtgccatggaagaaatcgcagaggggcattttatttatgctacgaaggaagaagcggcacagtatcagaaaaaattggcacaaaaaaaggggtagacctgtttaggaggagatgaaactgagtgttttaaaagcatacaaatttcggatctatcctacagaggaacaaaagcagttctttatccaaacgtttggttgcgtacgcttcacctataatcaattgctaaaagcaaagatggaagaacttactacaaatgcagaaaaagaaaaactaacacctgcaaaattaaaaaaagagtatccttttttaaaagagaccgacagtttggcactggccaacgcccagcgcaatttggaacgggcttttcgcaactattttcaaaagcgagcaggctttcctaaactgaagacgaaaaagaatatttggcaatcgtatacgacaaacaatcaacaacatacgatctacttggtcgatgatcagttgaaattgcctaaattgaaatcattcgttgcagtcaagcgtcatcggccaatcaatggtcagattaaatcggcgacgatttctgcaagaaacaatactgaattttatatttcgattctttgcatcgaagaaattcagcccttgccgaagaaccaacgaaagattgccttggtttatcatccagaagtgttggtagaggccaatgcacagttaccctttatcagtaccaatgccatcaaatctcaacaaaggctggcccgtgcagaacgaaaactaaatgtgaaagcaaaagctgtcaaacgaaaaaaaatggtgcttagtcatgctcgtaattatcaaaaacaaaaaggaaaagtttctcagctatatcgagcgcatcgtgatcaaaaaaaagaatacatcgatcaagtaacctttcatctggtcaaacaatacgatacgatttttttggaacggctgatcgatgagacttgtagatctacagggaatttttcagtcagcgactggcatcagtttattcgtaaaatcacgtacaaagcagagtggtacggcaaagaagtccgatttatttctttgtcggccaaagagtgtcaaaaaatgacgcaaatgttgcgtgtaatcgaaagtgaaacgaactgggaggagcgccagggatcgcctaggggatagaaaaaatctttggatttttgtttctaggaattctgctcactaattatgattaaccagcgaagaggctgtgacgtcaggcaaaacaaaaaatacccaaacgatacacaaacccacagacgctggctttatgctcagctgaaagtgattcgtctatcgtttcggttcttgtttgcttgtgttgcagcctctttgcacggcctacattttgtcgccaagcacatcagcattcaattcatagattttcgaaggtcgtccaataccgacgggcttttcaccgatttccgtgaaatattgaagcatggcttttttgaaatttgaatggtcaatcaatttaaaatcgatccccaaaaatttagcgaagactttacgtgcttcagtgatcgtgaagttttcgccgagaaccagcagtacttgtggttcgtgttccattttgtttgccactcgttcaaatgctttcaaaataatcgcgctatggtcaaaagccaatgtatccttaccgacagattgtcccgagactaggtccaagataatctcaacatcgccactagataaaaagatttggttcgcctttctctctaatgaaaaccagcggacttgattggcatcatccccagcgctcaaaggttcttcgccgataaaagcgagataactgaccgtaatgacccagccccgcgggtctcgccctggtgtgctgaaggtatggagttgttcgatgttttgctttgagatggttacgccgatctcttcttgcgtctcgcgaatgacactttgaccagttgactcattcggattgacgaaaccacccggtaaagcccaagaatttcgaaagggatgcccttttcgctgaatcagtgcaatcttcagttcttcttcttctttgttgtaacacatcaagaccatatcgactgtcacagaaggcttctcatattttggctggtcctgactgcgataccaagttaaaaattctgcttcagaagcttctttttcataatactctttttctgctgtttttgaggtgaattctttcattcctgtctcctactcctgatatgatgaaataataatgatgatggattagttaaaaaaatagggaaaaatcaaattgataaaaaagagtgctaaatagaagaatgccgctttttgtgtgtgcttcatggctaaatatccccacacagcgatccatagcaggaacccataacgaagcaatgatgtgatgaccacaaagaagctagctagattttgcccattgaaatagccgtaaaaatacaaataaaaactagaaaaaatcaaatggatgatcgttaaaacagctaagatcatgaagcgctgttgttgttttttcaagcgaaaaaccctctctttcaaacgttcattcctattatagcaaaaaaacagctcataaaccaaaaggagctgatagtaaaatcatctcatcaatttgggcaaaagaaaaaaggaaaaactcacagaaaattatggtatactaccttagtatacactttacaggtgaaaaggaggacgtacgcccatggctgaaaaagaaacattttatattacgacgccaatctattatccaagcggcaaattgcatatcggaaattcttatacaacgatagcttgcgacgcagtagcacgttataaacgtctaatgggctttgatgtgttttatttgactggtgttgatgaacacgggcaaaaaatcgaaaaaaaagcggaagaactaggtgttgatccacaagaatatgtagataaaatggctgccgatgtcaaaaaattgtggaaaacattggacatcagctacgataaatttatccggacaacggacgactatcacaaaaaggcagtccaaaaaatctttcaacaattattggaccaaggagatatttatcttggcgagtatgaaggctggtactctgtctctgatgaagaatacttcacagaaacgcaattggcagaagtttatcgtgatgaagaaggacatgtgatcggtgggaaagcaccaagcggccacgaagtagaattagtaaaagagtcttcgtacttcttccgcatgagcaagtatgcagatcgtctggtgcaatattatgatgagcacccagaatttatccaacctgaatcccgtaagaatgaaatgatcaataatttcatcaagccaggtttagaagatttagctgtctccagaacaactttcaagtgggggattccagtaacggcgagtcctgaacatgtggtctatgtttggatcgatgctttatcaaactatattacagcactaggctatggttccgatgacgattcattgttccaaaaatactggccggcagatgttcatatggttgggaaagaaatcgttcgtttccatacgatctattggccaatcatgctgatggcattagatttgccattgcctaaaaaaatcttcggtcatggttggctgatgatgaaagacggcaaaatgtcgaaatctaaaggcaatgtcgtttatccagagatgcttgttgagcgctatagcttggatgctttgcgctactacttgctgcgggcagtgccttttggcagtgacggcgtttttacaccagaagactttgtttctcgggtaaactatgatctagccaatgacctgggtaatctattaaaccgcactatcgctatgatcaataagtattgtgaaggaatcgttcctaaatatgcctcaaaagtaactccttacgatagtgagttgtcgacaaccgcagccaacgtcgtaggtcgctaccatgaagcaatggacaagatggaattcagtactgcattgtcggaagtatggacgttgatctctcgtgccaacaaatacatcgatgaaacacaaccgtgggtattggccaaagatcctgagaaaaaagcagaattagacagtgtgatggtccatcttgcagaaagcttgcgaatcgtagcaatcttgctgcaaccgatcatgaccgaaacaccggcaaatattttccatcagttaggcttaacttcagaagccatggacttgaaagacttgcggttcggtgaatttcctagtgataccaaagtagtggctaaaggaacgccaatcttccctcgtttggaattagagacggaagtcgcttacatccagaagaaaatggcggaaggaacgcaaagcactgctgaaacagtcaaatggaacccagaagaaacggttcttgcttctgaaaaaacagagatcaaatacgatgatttcgacaagatcgaattgaaagtagctgaagtgatcgactgtcaaaaagtcaaaggagcagataaactgcttcaatttcgcttagctgcgggtgatgatcaagatcgacaaatcttgtcaggaatcgctgagttttatccagagccgcaagatttgattggtaagaaagtcgtaatcgtagcgaatctgaaaccacgtaagatgcgggggcaaatcagtcaagggatgatcctttccgcggaagataccgaaggacgattaaaaattgttgaagctccaaagggaatgcctaacggatcaatcattgcctaagcgagacagtatttaatcatttctgttcttttttcagaaaatgaaattgcaactgaatgaaacattttgtataatggtctttattgagatgatcatgagggagtaactggcagcttatcgttgcggcaacatcaccatcctgaaagaaatttctggtgttgccttaaatagtgagactcgtgtatgtgttttagtgcatacatgagtctattttttttcatttcatgtacaataaagaaggaagaagaataaaggaggaaaaacatgtctgaagagaataaaaaagagcaactctcgcaagctttttatgcacaagaagctgaggctgttctgaaagagctgcaaaccgatgccaacggtttgacaaatgacgaagccaaaagtcgtctgtcacaatatggcgccaatgaattagaagaaggtaagaaaaaatcgatggctcaaaaattctttgaacaattcaaagatttgatgatcatcgtcttgttagccgctgcgatcatttctgctgtcgtgtcacatgaaatcgtcgattcaatcattattttagccgttgttattatcaatgcgatcatgggcgtggttcaagaagcgaaggccgaacaagccatcgaagcgttgcgggaaatgtcgacgcccaatgccaatgtgttacgaaatgggcatacggtgacgatcaaaagcgatgaactggttcccggagatatcgttcttttagaagccggcgatgtggtaccagctgatttacgcttattagaagctagttctctgaaaatcgaagaagcggcattaactggtgaatcggtacccgtagaaaaagaattgactgtgatcgatgcaacagatgttgggatcggtgatcgtgtcaatatggcttactccaacagtaatgtgacttatggacggggaaaaggggtcgttgtcaatacagggatggcgacagaagtcggtaagatcgctggtatgttagcaagagccgaagaaacggaaacgccgttgaaacgtaacttgaatgaacttggtaaattcttgacgatcgccatcatcgtgatcgccgtaattatgttctttgttggtacgatcttcaataatacttcttgggtcgacatgttgctgacatcaatctctcttgcggttgctgcgattccagaaggattgccagcgatcgtaacgatcatcttagcactaggcacgcaagtcatggccaaacgaaacgctgttattcgtaaattaccggcagtagaaacattgggtgcgacagacatcatcgcatcagataaaacaggtacattgacactaaaccaaatgacagttgaaaaactttatgtcaatgacaagcaacatgctgcttctgaagacattccattggatacaatggctctgaaagtcatgaacttcgcgaatgatactaagttcggtgaggaaggcaacttgattggtgatcctactgaaacagcacttgttcaattcgggatggatcaaggcttccacgtgaaagatcaagtgagtgcagaacctcgtgtagcggatctgccatttgattcggatcgtaaattgatgagtacgatccatgaacaagaagatggtcgttacttagttgcagtgaaaggcgcgccagatgtcttattgggacgtgcgtcaaaagtcttgttgaacggacaagaagtaccaatgactgaagaagaaaaacaaaaaatcttgttcaacaatacagatatggccaaacaagcgcttcgtgtcttgggaatggcatacaagtatgtagatgcagtaccagaaaacttggaatcagaaatcgtagaaaatgatctagtctttgctggtcttgtagggatgatcgaccctgaacgggctgaagcagccgatgctgtgcgagtagctaaagaagctggtattcgtccaatcatgatcacaggagaccaccgagacacagcagaagcaatcgctggacgtctaggaatcatcaagcctggtgatgacgcagctgtattgacgggtgctgaattgaacaaaatgagtgatgaagagtttgcacaaaaagtgactcattactcggtttatgcacgggtttcacctgaacataaagttcggatcgtgaaagcatggcaacatgaaggcaaagtcgtcgctatgacaggtgatggtgtcaatgatgcgccagcactgaaacaagctgatatcggtgttggtatgggaatcactgggactgaagtatctaagggtgcttcggatatggttctggctgatgacaacttcgcaacgatcgttgttgctgttgaagaaggacgcaaagttttctcaaacatccaaaaagcgatccaatatttgttagcggctaacttaggtgaagttttgacattgttcttagctaccttatggggctgggatacactgttgccgatccatctgttgtggatcaaccttgtaacagatactttccctgcaatcgcattgggaatggagccagctgaaaaagatttgatgaagcatgcccctcgtggccggaattcgaacttcttctctggtggagtcatgagcagtatcatctatcaagggatcttggaagctgcaacggtattgttcgtctattggtcagcaattcaatggccggtacacgatacctatgatgcaatccatgcggatgcattgacaatggcgtttgctacactaggattgatgcaactgttccatgcctttaacgttaagtctgtttaccaatcattattcaaagtgggacctttccgtaacaaaacctttaactgggcaatcttgctttcctttgcattgatgatggtcatcattgttgttcctggattaaatgacatcttccgagtggctcatttagatctctatcaatggggaatcgttctaggtgcatccttcgcgatcatcccgatcgttgagatcgttaaagctgtccaacgtgcaatgggcaaaaaataagcagtctctaaatttattccgcaggcagagtattctgactgcggtttttgttcacaccaatcgtcgtaaatgaataataggggcgaatgaacaatctgcttttgccgaccttttcatttttggcaataaacggtaaaataaaagatagctaagaagaaagtaggggaatgaatcgtgcgaccgaatttaggtttttatgtacaaacaatcaatgatctagtgaaagagacagagaaaatcggggaaaccatgaatccgaattatgaagagattcgtcaggctctcgataaaaaaaaggaatctgaactatcaccagagcgtctggaaacaatcgaagcgtcctttaaaaaaggaacggacaaatatcgtttgatgctggaacagatctctaaattacgcccgcctgcaacggtcatggggattcacaaaaaatttgaacgagcatatacgaagtatgttgctggctgtgaagaaatgattctaagtattgctgatggggtcgatcgggaagctttcgatgcgtcagagaaaaaacaagacgaagccactgatgaaatctcttttgcaattcagcggatgacagctctcttgttaaaaaaatgataaagttcgtttcttaaacgagagttatttaatttaaatgttatgttattcttatgtaaaatgatgatggtggatgtataatgaattaacaaccaacaacctttttatttttcattttactccttttgccatcaggactaaccaacttgatggtttttttatttttataaatgtttttttactcaaaataataaaatgactgcaaaagacattgtgaataaatttacctaacagtttgttagtatcgtttcactgctaatctaaaaacaagtatcgccaattgcggtttttcgcggtagatgctatactgaaaacaacttataaacgaaatgagggatcctccattgaaaaactaaccaatttgttggaagctgcatagaatcatgttctctagggagcagtgtgcagattttcaggattggtgtgtttttctggagggtctttttgtgtacttttctggaacctgacctgaaaataggcgcggtttttgtctagagatagacaggaggtacaaaaatgtcaaatataaaaatagaacaattaagttttggcttcgatactcagaatcatctgctgttcgatcaagctgatttggtgatcgatacccagtggaaattaggtttgatcggtcgaaatggtcgggggaaaactactttactcaaattactgcaagaccaattgccttatagcgggactatcacccatcagcaagcattcgtttactttcctcaaccagtggcagatccgcaacaactaacctatgatacattacaagatctgtgtgaatttgagcaatggcagatcgagcgagagttaaatttgcttcagttggatccagatgtcctctggcgtccatttgagacattgtctggtggggaacaaaccaaagttttacttgcactactgttcatcgatgaggaacactttccgttgatcgatgaacccaccaatcatttagacattacagctcgtgctcatgtagctgcttatctaaaacggaaaaaaggctttatcgtcgtcagccatgatcgacactttgttgacgaagtggtggatcacattttatcgattgaaaaaagccgactagtgatttatcaggggaacttttctgtttacgaagaacaaaagcaacggcaagatcagtttgaacaggagcaaaatgttaaactgaaaaaagagatcggccgtttaaagcaaacggctgccgaaaaagcagaatggtcacgaggacgggaacgagataaactgggatcaccaacaaaaaaaggcagtggagcagtctatgacacaggggcgattggtgctcgggcagccagaacgatgaaacgatccaaagcaatcgtcaagcggatggaagatcaagcacaagtcaaagaacagttgttgaaagacatcgaatatatcgatcccctttctatgaatgttaaagccacgcatcacaaagttttgctgcgagtggaaaatttgcaattgacgtatgagcaaccgttgtttgatccgttgaattttaccatcgaagctggtgaccggattggtattttgggtgcaaatggttctggcaaatcgagtttggtggctggcctattaggtcattttactggaactgtcaccggctctgtttggatgccgcaacatttgtccatcagtcgtgttcgccaaaattacgaggataatcgaggcaccttgactgagtttgctgaattccaccgattggattatcaagaattgttgaataatctgaagaaattgggcgtggagcgaaatgtctttcagacccgaatcgaagatatgagtatggggcagcgtaagcgtgtggaattggcaaaatcgttggcaacccctgctgagctgtttatctgggatgaacccttgaattatctggatgtctttaatcagaatcagttagctgaagtgatccaacttgtccaaccgacgatgttgatcattgaacatgatcgccattttctggatcaagtgactacacaacaatttttgcttggacatacagatctagcgcgtccataaatcgaaccgggataggatttttttaaatcttatcccgattttgttattttaaagtggtaggtttttgagaaagataccctattttgatcgttagtctgtttttttgatttgagtggtctagataaaaaataataaatggggtgcctgttttttctttttttatttattttagctggattttttatttattttgcaagaaaaaaagccttactgtgcaatattctgtcgttcaacaatctcatttttttctcatcgttctgctagttaattaaaatttctatcataattaccaaagggttttacaaaagatttacaataacagtaccgaataaaaatattcatttgttatcataaaaatcgaatttctttgagcgtttgacaacagcctgtaagaattcagctgtttttgtgttcctatcttgctggtcgaacaaaagcggcaaagagaaaaataatggaggttctttttttgatagaagtagttgggttgaagaaggtctttgacaacaagtttgaagctttgaaagcggtggattttacgatcgagaagggcgatcttgtttgtttacttgggcctagtggctgtgggaagtcaacgattttgaatttgatcgctggattgttgagtccgacagatggggatatccgctttaacggaaattccgtggtgaaaacggagccaaaggatcgcaatatcggctttgtctttcaaaattatgccttgtatcctcatatgaccgttttagaaaatgtcatgtttccactgactgttggtgataaaaaaatcaagaaaaacgaagcgcagcaaattgctgaaaaatatatgcagctgaccaatattgaagaattgaaggataaaaaacctggtacattgtctggtgggcagcaacagcgggttgccatcactcgtgcattagtccaaaatcctgaagtactattgctggatgaaccattgagtaatttagatgcgcgtttgcgtttaaagattcgcgaggagattcgtcgcttagtcaaagaagttgggatcacgacgatttttgtgactcatgaccaagaagaagcgttgtctatcagtgacaaaatcattttgatgaatgaaggcgtgatccagcaaaatgatgatccgcaaaatctttatttagaacccaataatttattcgttgcaaagtttatcggaaacccaattatcaatatcttgccagtagaagtgacagatggtgtcatgcatcatccagaattcacgatccctacagagcgcttcgtggatatccgcttcaagaaaccgttgacagatggtcattatactttagggatccgtccagaagatgtgttaacgacgacccaaacaccattattcaataccgagataaaaagtgttgaactaattggtcgtgaacggatcttgaactttgatctggctgacatccacgttaaatcgatcgttagcatcgaagaaatcattgaagaaggagcacacttagcttttgacttcaattacaaaaaagcgttcatctttgatgaaaaaggggagcgagtttattgatgttcaagaaaaattataatcccgaaaatcaacccaaagcttggctgttcttattgccctcactagtcattattttgctctttagtgtgtatccattatttcgttcattgtttatgagttttcaaaaaggatcattgatcaatcagcgatatgccggattagaaaactaccaaaaagtgctgacggatccagtgtttttcaaggcgctaaagaatacagcttggtttgcattcgccgtggttcctattgcattagtgatttcactagcgatcgcttggatcatctttgaaaaggtgaaacataagagcttttttgagacgatcttctttatgccgtatgtcaccagtaccatcgccattgggatcgtgtttcgctatttctttaatgggtcttatgggatcatcaactacttgctgggcttagtggggattcccgccgtcaattggctggataatgtcaatatgagtatgccgacactgatcatttttgggatttggagcagtttggccttcaatattattattctcttagcagggatgcgtaacattgacaaagaacattataagatcgcaaaaatgtttggcgccaataactgggagatttttcgcaagattacttttccgcagttgattccgacatttgccttcttgttgaccgttaatatcatcagtgcctttaaagtctatacacaagtctatgccttgtttggtggtcaacccggtatcgccaaaagcgcaaccacagctgtctattatatttatgacaaattccatattgcgggccgtcctgggatcgcaatggctgcgactgtgattctctttgttattattttggcggtgacctttatccaaaataaaattttaaagaaagtaggggaataagatgaaaaaagtcgtaaccctcatctctctgatttttttggcgctcttagcgatcatcacgatttttccgtttatttatatgattctcgcgggactgatgacttatagtgaggccaccagtattccgcctacgattttgccggagtcctttcaatggagcaactatgccgaagtctttaccaaagcaccatttctccgttactttctgaatacagtctttgtttcagcagtcacgactatcgccacattgattactgctattctggcagcttttgcattgactagtttggaattcaaattcaaagggcttgtgattgctctaatgatttccttattgatggttccttatgaatcaatcatctttaccaactacaacacgattgctcaaatggggttgttgaatacttacagtgcgttgattattccctttctgacgagtatcttttatatttattacctgaatggctatttgaaaagcatttcgaataccttttataaagcagcaaaaatcgatggtgcaagcgatatggcttacatacggcggatattgatcccaatgtctaaaccggcactagtgactgttggcatcttgacctttatctcgagctggaattctttcttgtggccattgttagtcacgaatgaaaaaaaatatcggttgttgaacaatgggctagcggccttcacatcagaaagcggtagcgatgttcatttgcagatggcagctgcgacattgactgtcattccgattttgatcatttatttgatttttagaaaagagattattaaaggagtggcaaaagatggcatcaaaggctaaaacaacagttacatttcacagtggtattctcacgatcggcggcaccgtcatcgaagtgacatacaaagatgcccatattttcttcgattttggttcggagtatcacccagagcagccattacccgacgaagcattacagaccttagtggatcatcgctgggtcccgcaattgcgcaatgtctatgatcctcgtctgtcttatacgtatcatggatcagaacaaaaggactatcaagaaacagctgtttttctatctcatgcccatcttgatcattcaaagatggtcaattatttggaccctgcaatccctttgtataccttgaaagaaaccaaagcgatcctaaaagcattgaatcgcaccggtgattttttgattcctactcctcatgaagcccctgcctttgtgcgggaaatgattggcttggaaccccacgatgtgatcaaagttggtgagatcgaagtagagatcgttcctgtggaccacgacgcctatggtgccgcggcattgctgattcgaacaccggatcactttattgcctatacgggcgatttgcggttgcatggctatcatccagagcggacaaaagaattttgtcagttagccaaacacacggatctattgatgatggaaggagtcagtatcagttttcctgaaagagaaagcgatccagatactatcgaagtagccagtgagaaagaattggtagcggcttttgtcgagttggtcgaaaaaaatccacaacggcaaatcactttcaacggctatcctgccaatgtagagcgttttttagctttggtggatgcttgtcctcgaacgatcgtccttgaagcacaccaagcagcattactgaaagaaatctttgacagagaagttccctattacacggttgaaggcggagcttccttagcagagttagatcctgcgctagaaattgattatcgttctttatgtgtcgacactggccagtatgtctggcaagcagttgaccattttgaaaatttacaaccaggcagtctgtatatccatagcgatgcacaacctttgggggcttttgatcctgcctatgaagagtttctcgctttgttagcaaagctggaaattgagtttgtacggctgccggtttcgggacacgcagttcctgaggatcttgatcagattattgcgtggatcgaaccaaaaagattggttccaatccataccttgaaaccagagaaactggtgaatccgtatggcgaaagaatattgccagaacgtggcgagaaaatagaactataaaaggatagaggagagtaaagaatgaaatcaaaaaaactagcatttgcagcagtggctgcggcaactttagtgttaggggcatgcggcaacaatggctcaaatgacagtgcaaaaggcagcgatgagatcgttacagaggttccgaaagatactactgtcacattttggcatgcaatgaatggtgcacaagaagaagcactgacgaaactgacagatgagtttatggaagcaaacccaaatgtgaaagtagaactgcaaaatcaatctcagtactccgatttgcaggcgaaaatcaattcgacactaccttcaccaaaagatttgccaaccatcacacaagcgtatccaggttggctttggaatgcagctcaagatgaaatgcttgttgatttaggcgagtatatcgataatgatacgattggttggggtgaccaagaagaaattcgctcttcattattagaaggtgcacaaattgatggtgtccaatatggtattcctttcaacaaatcaacggaaatgttattctacaatgcagatcttttaaaagaatatggtgtagaagtaccgacaacattagatgagttaaaagaagcttcaaaaacaatttacgaaaaatcaaatggcagcgttgttggtgctggctttgattcattgaataactactatgctattggcatgaaaaacaaaggtgttgattttaacaaggatttacagctagacagcgatgaatcgaaagaagtcatcaattattatgcggaaggtgtgaaagacggctacttccgtattgctggatccgatcaatatctttcaggaccattcgcaaacgaacaagttgcgatgttcatcggctcgattgctggagaaggatatgtcaaaaaagacaccgaaggcaaatttgaatatggtgtctctgcccgcccagaaaaaatcaatctacaacaaggaacagacttatatatgttcacaagtgcatctccagaggaacgtaccgctgcttttgaatacatgaagtttttgacttctcctgagtcacaattagaatgggcagtttcaacaggatacatgccagttgttcaatctgttttagatagtgatgaatacaagaacaatccagatacgaaagttgcttctgagttaagtgaagcaacaaaagaacttttctcgatcccagtaattgaaaatgcagactcagcttacaatgaagttcgttccatcatggagaatattttgtcgaatactgacaaagataccgataacttgattaaagattccattccacaacttgaggatgtttggaatcaatagttctgctcgtaaaagggccagacaatgaccctatcaacccgaaagagaccgtcagatatccctgcggtctcttttacataaatgttagaggagtaatgagaaaatgcaaatcacctttcttgaaaccagcgacatgcacggctatgtctacccaactaatttcgccgacgaccacgatctggctattggggcagcgaaagtcgcaacgaaactaaagcagttaaaagccgaagctgatggtcctgttgtaatgatcgaaaatggcgattttatccaaggatccccactgagttattatattgccaaaagccagcatccggtagcagaattgaccaaagtgatcaatcacatggcatacgatgtccatgttttaggaaaccatgaatttaattatggattaacgtatcttcaagaggcaatcgctagttatcagtcccctgttttagcagcgaacatcttaaatgaagagggacagccctatttcggcaaagcctatacgatccttgaaaaagatgggattaagattgcggtgttgggattggtgacccagtatattcctcattgggaacaaccagctaccatcaaggggatgcggttcgaaagcattatccaaacggcaaaaaaatatgtgcctgagctaagaaaacaagcagatcttgtcatcgtcagctatcatggcggttttgagaaagatttggtaaccggtgaagccaccgaattgttgaccggagagaatgaaggctatgagttactgcaagaggtgccggggattgacgctttctttactggacaccaacatcgggaaatcgccgccattgtcaatggggtccctgtggtccagccaggttatcggggcagccaaatcggccgaatccaattaacaatagagaaaaaagagggtcaaacagtgattacggatcaacaagcgacattgcattcagtggcagaagtttcagccgatgaagcaattttggcaatgatcgaaccaattgagacggaattggaaagctggttggatcagccgctagggaaagtgaacggggatatgcgaattactgatccgatgcaggcacggatcgtggaacatccatacgtggaatttatcaatcgcgttcagatggctgccagcggagcggaaatatctgggacagcgctcttcaataatgaaggaaaaggcttcggtacaacgatcacgatgcgggatgtcatcacgaattatatttatcctaatacattggctgtcgtaaaagtgaccggagcagagttgcgtcttgcgttggaacagacagcgaattacttagccgtcgaagcagggaaaatcgtctttaatccagcctttatcgagccgaaaccgcaatactacaattatgatatgtacgaaggaatcgactatacgattgatatgaaccagccagttggcaaacgaatcacacgcttgttgttccataatgagcctatcacgccggaacaggagctggaagttgtcgtaaatcaataccgagcggtaggcggtgggaattacgcgatgtttacagccgacaaaattgtacgggagatccaagtggatatgactgaattgattgctgattatttgaaacaacacccagtactagaagctgagacgaatcagaatttcaaaatcgtgtactaaaaagccaaaaagggctgtgacataagtcatgcaacaaacgaacgattccgaggagaatgagactgtgcttgcgcttcagcaagtttccatcaccaatgtacgatggatgacacccagttatcctcggatcgtcttgtctagttgctacttatgacacagaccctttctatgttcttgtaaaagaaaatcagattagttttctacattgcggacatattcatcgaagtaacgaatcaaatcggcttttacctgctgatagtcttcttcgctatagtttttttcctctaattttgcttggaaaaaaggaagttctaactcttcttttaagcgctcaagcacttcttcttggttcatgagatcaccttttcgtctatttggtaccatcataacaaattgaatgcggctgtcaatgcttcatacatttctttcattttttccaaacgacttttaagagaaacaaagtcatcgtcatcatggaaaaggacttgtttcaattcaaaatagtaaatctcaaaagcatcaaagaagccagtaacttcggatgtttgcaattctttaaaggtatcacaacgaatataggctttttctgcaatggcataggtttcagccgtagtcaataagacgagggcttcattgtaacgacggctagtgaccaattcataagttgactggcacttattataaatatttgaaaaatctttcagtaaaagctcgatgggtgttttatcaaacatgggggagtcctcctgatcgttttatttttcaaataagacacaaacacattcaggcgcgtaaacgtctttttgaatagtagtgagttcaccagtttcggcgttgcgacggtacaaagtcaagttgtcggaattttgattggcacaaactaagaatttgttggttgggtccaagtcaaagtctcgcgggaagtcaccttctgttgatagacgttgaatgaaattcaagccagcgccatcttcagttacttcaaagacaacgagagagttgtgtccacgattggatgaataaacgaaacgtccatcttttgatactcggacagcagccccactattaaagtcggtgaaatcttctggtaaagtcggtactttttggatttcttcaaagctgccatcagcttcattgtagcgtaaaacagtcaaagagctgtctagttctcctaccagataagcatattggtggttaggatggaacactaaatgacgagggcctgttccggcagctgcaacataaacagccgcttctgttaattttccttcagcagaaacgtcatacgtatacacacggtctgttccaagatcacatacagctaagcgttgatccggcgttaagtctgtgtagtgtacatgagggttgtcttgattttcgtgaggaccaacaggttcatcatgatagatgtgatcagtggcttcaatactgccgtccgccaatattttgtagacgtttacttcacctttatgataattagcaccataaacaagttgacgaggttcatctactgctacataacacaatggtgcgccttcttcggtcacagtattcaacaactcaaatgcaggcgtataagcaccacaaccgcctgcgccatcaacttcggtcacagtatatactctttcttttttactgcgggcaagatacgttgggctcttttcttccgcacgcaaggtcaagtcgaccaattgttctttttctgtatctaaagtgatcgaatagatccctttactttcgcgacgcgtataagtgcctaggtagatcgtttgcaacataaaaaaagcctcctaatagtttgatttcttattaattctaccatagaatgcggaaatgggcggatagaaaaacttcttatgttataataaaaaaagaacataaaggggaggttgttgtatgaaacaaggaacaatcaaagcgattgggccacaagcgatcgatcaaaaagaaaaaatgctgatttttttcggcgaccaagcaacagagatcttaagggagtattcagtgatccaatcgattccagattctcaagatttggtcgtagaaaacggcgatacacttatttttggggatcagtcgtacaccgtgacacatgtcggtcctatcgcaaatcaaattttgcaaacgatccagcatgtgacatttatcttcgatgaagtacccgaagagcaactgaccagcgctatctatttagaacctttcaatttgccgacccttgaagttggtatgaaagttatctacaagtaggaggcggggaaatgaaggaaacagagaagcgccctttgtcctggttttggaagtggtttttaaataatcaagcagtcacgagtctattagtggttctactcgtcttattgatcttgtttatgtttacgaaagtatcctatctatttgagccaatttggcaatttctggcgattgttggattgccaatcattttggcggggattttgtattacttgatgaatcctgcggttgattatctggaacgaaagggaatcaaacgcatctatagtattttcggtctttttattttggtcatcggattgatcgtctggggcgttgtggtgattgtgccgaagatccaagaacagtccatgagtttcgttgagaatttgcccggatatttggatatcattgaaaataaagtcaatgagattttgtccgatccgattttctcacaagttcaagatcaattggaagcatctaatgagaagttgattgcatcaatgaccgacatcattcaaaacttatcacggagcacgattcaaaatatcggcagcttttttggggccgttgcaacggtggtattggctgtcataacgatgccctttattctcttttatcttttaaaagatggacgacagttagcaccttatttcgtgaaatttttgccgacaaaaatgcgtaaaccatcattgacggttttaaaagagatgaatgatcaagtttcttcttatattcgcgggcaactaacagtcgcatttgcagtagccatcatgtttatggtcggttttagtttgatcggcctagattatgccatcacattagggatcgcagctggctttttgaacttgattccatacctaggctcttttctagcgatggttccggcggtctttttgggtatcgtcggtggtcctgtcctgttggtgaaagtcctggtcgtctttgtgatcgaacagactattgaagggcgattgatctcaccactcgttttaggaaacgagttgtcgatccatcccgtgacgattttattagtattgctgacttcgggtaaactcttcggacttgtcggcgtgattctggggatcccggtatatgctgcggcaaaagtgatcattacccatatttttgaatggtatacgaccgtatcgagtttgtatgaagaagaaacggaaagcgatgttcagcaagaatagttcgaagaaaattttttgacgaaagatctttgtgaaaatcacactgactcacacatttttctagttttttatcggagtataaaaaagctgaatttagaaggctggagcgaattgcttcagcctttttgttatgtgcgatttttgacacatagttgcaagaaaaacatatagcttctgtttctagagaatgcttatactgaaagcacatacaagcaaaggagcgttggaatgaagattcttgcagtagatatcggagggacaatgatcaagacggggttgttgaatagtcacggagaaagaatacaattaggaagctttccgatgaataaagactattcaactgtgatcgaccgattgatttcacatattgataatgactatccaaaagacttttccggaattgctattagtacgacaggattagtagatccagtgacacaacagattgggatggattcaccgctttatgagggatttggtaatcgcatggtttcttttttaacggactattatcaaaaacccgtcatcgcggagaatgatggcaattgcgcgcttttagcagaaaaatggctgggaagaggaagaggcgctagcagttttgctgtcattgttttaggtacctctgtgggaggcggattgatggtcgataaccagttgattcgtggcaaacactttttagctggcgagtttggttatatgctgtttcctgaagtcgaaaagaaagattgggaaatttggagtattgccggtgcaacaagaacattggtagaacaagttgcagccgaaaaaaaaagccccctcgattgatgggtataaagttgttgcttactaccagcaaaacgatccggcagtgacgatttgggtggatcgctttattgaaaagctagccgtggcctgctacaacctacaatacattcttgatccagaaattgttttgattggaggcggaatcagtgaaagcgactttttactgccgctattagaaaagaagattcagcagattgcagcgcagattcctagtacagttcgattgccaaatgttgcctgttgccagtttgggaatgagtccaatttaattggtgcttgctacaattggttactgcaaacttttgaaatgaaaactagctaaaacagttgcaattctaagataaaaatgtaataaaaaaatagtctctatttttttattatgtaagcgtttaaattgcagcgaatgaaacaagggtcaggtgataaaagcgaaaaagttttacgatcaaaacgggcaaaacacgttcagagggatcgcgcgctcaatcagttcctacttgctggtattcctgatcccctttttaacggtctcgtggatttggtatgcgacttctgtcaaaagtatcaatgaacaggttgcattaacggcaaagaatcagttgattcaattgaaatactccttagagaacaacttccttcaattgaactacctgacccagaaaatgacggatgaccatcaactctcattaaattttttgacccatccctattattcaaaggaaggcaaagcaagcctgcaaacctacaagatcacgaatgagtttgtcgaagaagtttatttatactataaagaagaaccggagaactttttttcttcgattggcaaattatccgtcgaaggtttcttagaaaaagtaatcccagataatgatatgcagcaaggacagctgatcgatcagctagagaaagcttatccaacgttgctgactatcgaaggggcatcattggcacggcatcattcccgattcttctacattgtgccgttacaaaatgatgaactgactgtctatggagcagctatttatgagatcaaagaagctagcttagcaaaaatgctggacttgaccaatagtgatggtgcgagtacgaattatttgatcaatgatgagtttcagattttagctagcacaaatcataacaatttgacagtttttttgaatgatccccaagaaatggctcagatcaccactcaggacacctttcagtttaatcagcaaaagtacctcgttcaatcaattcccaatgaggaactgcatatctcagtggtatcggtgaccaatccatcacaagcattatcgctggtcaatcgcgttcaagaacatttcattcttatttttatgtgtattctattcgtggggatcattgctgttacattaatggggatcagaaattatcgaccgatccgcaaaatcgaacatttggttcgagaattccataaagatatggagatgtcggtcaattcgatggatgatgttcataatacattggctgctgttttagaagaacagcaggaactgcataaagaaatccagatgcagacgccgcatgctcgagaacaagttcttagaaagctgatgagcggtcgtctgcgttcggaacaagaagttgcaaggctgatcgaagccgttcatattcattttcctgcggacaattattttgtcatcacgatcgataccaaaaccgtggcttcaaaatataaagccggcgagagctgttttctgattgactatattgaagaaatcagcagccaagggtacacagcctacgccacagagatcctttccactgaagtgatcgcattgactgtgggatttgatcacagataccaacaggaagagatcgttcaagaagtcgcggcaaaaatagcagctgcgattggactgcttccagcaattggggtgggaaccatcgtcaatgaattgacggctatcaatgaatcttatattgaaggattagctgcattggattatcatgtcagtaacaaccagcaaatcatttattaccttgaaatttccgcagaagaacaacgctcggcgatccagtatcccgacagtcaaaaattaaaactgatccaagcattgaatcaaggaaatagcgatatcgcaattgaaacggtgcattggttaatcaaagacgggttaagtaaacaacgatctcagccggtccaaaagatgtatggctattatttattgaatacggttgcacaaactggaggcgaattagtgggagaggagattttgctatttgcagccgaacatgcagattttactaatctgatgcagctaggaacggtgttgcaacaattggtccagcatatttgcgaaaaagtgagggatcgaccacaaaatcaagaatcggagttgaatgaaacgatttttgcttatatcaaagcaaattttcagtcttctcagctgtcattggaatctattgcggaagaatttaaagtatctgtctcttatattagccgatttgtgaaaaaagaaagtggcaaaacattttctaagtatatccaagaactgcggttagaaaaaatcaaacaagaattagtcgaaaccgatctaccgatcaaagaaatcattcgggacaacggttattatgatgtctcgaactatacgcgtaagtttcgaacgatcgttggtgtaacaccaggacaatatcgcaaaatcaaccaaaaacgctgaaaatgcgaaaaatgaagggaaatgtgacaatgaaagaaatgactcaaaaagcgagagaactttatacttctattggtgtctcattagaagaggaaccaaaaattaagatcgaacctgcactaacggcagattttattcttgatgaggaacaaaaaacgatcactgcgaaagatccccagcaattattttatggtctgacaacctactatttgaatcaagtgacgaagaaacaacaaaaaaacagctacaccgcccaaatcaaggagcgctgcctaatgatcgatattggccgcaaatatttttccttaaaagaactaaaagcactcgttcacagtatggctttttttcagtttacccatttgcaagtccatttttcagaaaatgaaggatttcgaatcgagtctgaacgttttccggagattgtatcaaccgaacatttaacaaaaacagagatccgagaactaatcacatatgccaaaggttacggtatcgagatcattcctgattttgactcccctggacatctcaagcaagtcttagccacccatcccgaatggtgtttacctaacgcgactggtggggtcgatgctagggcattgaacattcttgaccaagaagctgttgctttcatccgagagatctacaaagaatacgcagagctatttgtagatagccattatttccatattggtgcagatgaatttgttgattttgaccgtctagaagagtttccgactttagttgaagctgccaaagaagcatatggaccagaagcaagtgggattgaagtattcattgcgtatgtgaatgatttggtggactatgtgactgacttaggttttgttgttcgtgtatggaatgatgggttttatcgcttgaatcgaaaggaacagctttccttaacgaaaaactgtgagatttcctattggacacgctggaatcaaaatatggcaccagtcgctctttattttgacaaaggctattctgtgatcaatcacaatgacaatttcttttattatgtagtaggtgaagctgcagggtatacgtatccgacctatgaaaaaataagcgatgagtttacattaacgacttttgccaacggacaacaagtgacccaagaacaactagcacaaaccccagcgatcgcattagcgatttgggcagatatcccagatgcaaaagaaggtgcggcagtgatcacagaagctttttggctgcaagctatcattagcctaaaagtttatgaagaaacagatccagggaaagaaacctttagccaactatttcagaaatggcagtcgttgttgactaaagagcagtaaagcgaaacgttctctaggaaaacgtgacttgttttaaagtggacgataagaagagattcctaagaagaatacatggagagaatacctaaagcgagtatttaaagcaagtacttaaatagtagacggcagtctagtgaatcttcgtcgtgggtttgcgaggaagatttactgtctgccgtctatttgctagagatattgtctagcgctttacggtattctttgttctactcttttcacttcaatgtaatctcaaggactggaatgagaacattaggtggcactaccggcagcgtgacgactagatcattaggagcaatgacagcttccgtagaagtgatgacttcattaggatcaaagccacgataaaaaatttcagagccatcatgcaagaagcggataaagcgaacttgatcagcaatttccggcaaatgaatatgtttgaagggatagctatatacatgcaaatagagtttcttgccattttgagtataacgacaatctttaggtaccgggtatttactaggaccacaatcgatgatagcttctttatgcagccgtatccatgcaccaatcgcctgcattcgtttgactgcccgcgggtcgatctctcctcggggattaggaccaatgttcaataaaaaattacccccttttgaaaccgtatcgatcaacattttcaccaacatatcacttgatttccattccaacgcatcgcgatcatagccccaagtcccgtacattgtctgacaggcttcccaaagaacaggtaaaccgtctttttccagtggtttttctggttgaaattgttcaggggtggtaattccccgaccaagttccaagcgatcattgatcagcatatccggttggagtgtccgacagattttttccagtcgcgaactgtcccagtcttctgctccttttcctttagaccagccccaatcacgatgactgtaaggaaagtcgaaccacatataatcgatcctgccatactgagtcaatagttcggtcacttgaccagcaatgaaatcttgataaataagcatatcccgttgagaattggactctcgagcggctaagtcacttctttgaggatgcaatccatcaatcgtaaaatgagggtggtaccagtcaatcagcgaatgatagagtccgattttgattcccacatcacgaaacgcaggcaataattctgcgagtaaatctcgcttaaagggtgtattggtgactttataatcggtccattcactatcccatagggcgaacccttcatgatgtttcgtagtaaagactatatattgaacaccgcaatctttagctgtttgggcccaaacagcagcatcaaataaattgggattaaattggtcgaaataagtttctcgataagtttcgggggcaatttcttcggtggtcataaaccattcgtggcgtgcaccaatactaaataagccaaaatgaatgaacaacccaaaccgatcatgaataaaccagctaggatcggggtaatgatcaggccaattctgaaatgttttcatagagatactccttaatcaatgaattcggtgtttgtcataaccgtttctttaatcttccactgcccattctcgagcacaaaggtatgatgggcttgggtaatatggtcgcgatagtcattctgtccttggttcactgttttttgctgtgcagctaccagcatggagtctgcttcttgtttgacaacttcaaaagacaagagttcatgagtcaaatcatatttcgcaaaaaaagcgtgcatttcctttgccgtagattctcttgcagaagtaacaagggtcgctgtgtagccctcaacgtctttctgggtggctgcctgcaggttttgctttagtacggtcagacacgcttgtgctgcagaagaatctgtaacggctcctgtaacttgcaaacgcgctacagtggtttctgctgaacgagaagttgtctgttgataaaaaaatagaccgcaaatgaaaagtaaaccaacgaaaaataagggataactcttttttttcatgcaaatcctccttgttttctgcactattttttgtactttttttgtacttatacatcagatatcttgctggcactataaatgccatggaaaagatttcttcccaaactgccgacacttgagggatcatctactggcaacagtggcatctctagttctggtaatctagtgatgtgaccatccaaatagttctgcaaacgccattgtgccatctcggcacgtttagatagagcgccgtagcgaagatcgatcacttcaaacccaaaggggcggttccattcaaaccacagatctctatgagattgatgcaagtgttgtaattcctgctgatagtgctgaatcatctcaagggctttttgaaggttctcacgttttttttcatgataggcttctgagatccagggactcaaagaagctttcaaagctagtaccaccgctaattggtgataaaagcggaacatccgttgtgtgtcctgtgtccccgtgactgcggccaatcgttgggccagttcctcataatgttgggtcaatggcacctctctgaatgtcttttcataaaggccataaagaatatcttgataaagcaataatttacttggatttgatccagaaggattttcggcagcaacaccgggagtttggtcaaaaagatccagcaaaagaaaatcttctgcttgtgatccatgaaatagtttcaagtgatctgtgactatctcccgcgatggcgtggcataaaactgggcttcgctaaataattgtagacctaacaagctggcaatcatcggggtctctgcgccgtcatctccccataaggtagcatagacttcagtgatgccatttgctttggcacttcttaatgcttgctccattgtagcgatggttttgccataattgggtgccagtccattccatgtccaaataccgccagcaaatactgtgggttggtttagctttttatgttcagcaaacagtcgttgatatgtttgaaaatcatgatgataataatcccagtacaccatgttgactgctggaatttgctgaatgacttctggaggaatgacgactgctggatcatagtaatcgcctgttggagaaccaatccgaaagaacatgtcactccacatcatgggttctaattgtagctgttcacagagagtgatgacgtgttttaaatgtttaatcatgatggcaaagcgatcttctaaaccattgtgttcgaggtaacggccttttcctaattggtgtgcttcatccataccaatatggattttatttgttttgaagcagctgcgaatggaacgaagagcggcttcaagaaaaatgtaagttttgggctcaccaactagcagaatgtcttccgtgtcacgtatctctttggcaaaatgccactttaatggatttgtcaaatgagcgagtgtttggatcgcaggaactaatgtaacgcctaattggtcagcgtaatggtccaattcccgcaagtcagattgactgtatctccctcgcaaatgaccaaaataaggatattcaggaatttcgtaagtatcttccatatatagcatgagactgttgagccccattttgctgctcaacaaaatgaaacgtttcaactgaggtactgtcagtactgcatttcgagataaatcgatcataggaccgatttggtcaaattgcggagtctcttcgtggacaaaatcggtatctgcttgcatccatagaaggagccctcgaaataaatgggctttttcctgatagtaaatcgtggctttttctgtattggaaatgattttcaatgatccttttcggcggatcaattcaagcggtttgccggtttctgatagtgacaagccaagttcaggagcaacgatttgaaaaaaagcggcgacgttttcgttggtgacaatctttatctccatgattcacttctcctttagtaaaaaatcgtcagtgttcatttgttagcaactctgttttttggatcgcttgataggcgaaccaactgattggccagagaagcaaagggatgaaggcaatgaataacaaaatcggcaaaaaggtagcggcgaatgtaaccaaaaacacacctaagatcatggcaatcgtttgtggcacactaacgatcattaaaagaaacgcattcctgaaatagacccaaaaaggaagatggtagcggacaaagaccggcagcaaataaaagctgatgagcaaaccgctgataaagagtaccgtcaatccgaaatggagaaaggcattttgcaagaatgtactggagatccgcagctcgatccatagcagcagcaagatcgccatttgcagcaaacctagttgattactacgccaaaaatttttggctgtctgttgtttgaaccaactataaagttcagcaggcagtggtttttttgcaaataattcaaagaaatagcgaataacagtagccgtcgctggaaagaagccaaaaatgattcccccccgtaagacaaaaaagaaccacaaaaaatgcaatcgaatcaccatcagcaaatagtcacccaaccggtaagatagatcaaataaccctcgtgattgtttcatggacacccctcttttaactaattgataaaaagtagaaaactactagccaaatagtagcaagaaatggaccttttagaaagcgtattcaaaaaattacatagccggaccagctaatacatacaccttcctaaagctatcttttgaaaacattcgattgcgacgaggagcgctagcccgcaggagcaagttttctagataaagagaaaagtacgacgaggagcgctagcccgcaggagcaagttttctagataaagagaaaagtacgacgaggagcgctagcccgcaggagcaagttttctagataaagagaaaagtacgacgaggagcgctagcccgcaggagcaagttttctagataaagagaaaagtacgacgaggagcgctagcccgcaggagcaagtcttctagataaagagaaaagtacaacgaggagcgctagcccgcagttttcttacaaatgagaaaggtgaaattgctagagtgaacatggcgtctgataccgtaagctaaaacttcaattgaagtggtgtgttttttaaaaagagtgctcttttgttacaaaaaaataaagtttgacatagctgctgaaactacatattgatagcgctttattttctcgttagattagtggcgaaaggggttggataaattgacaacaattcgtggggacattgagtctgcgaaaaacagtaagcaggatgatcgttggtaccctgagtcagagatgctggccaagcgtttggaatggttccaagatttaaaatttggggtaattttccattatggcttatacgcacaagcgggtatcgttgaatcatggcaactatcagaaaaagatgaatgggcaagggaaaataaagcttatcgagaagatatcaacacattgcgtcttgattattggcaactgatcaaagcgtttgcaccgatagaattagatactgatcagtgggctgaaacgtgtaaaaaagctggcttcaagtattgtttgttcacaacgaaacaccatgacggctttaatctcttcaatacgctggagtcagaattcaaaattggcggtaaattgagtccttttaaacgagatatcctaaaagaagtttttgcctcgttccagcaagcgggtattgctactggggcttattattctaaggcggactggtactcaccgttttattggctggatgatgaaacgatcaaagggcgtcacgcaagttatgatccattagaacagccagaaatctggtcgcggtatgtggattttgttcatcgacaaattcatgaaatcactggcaactatggaaaagtggatttgctatggctagatgccggctggtgtgggcaggggaaagaagatttacagatggatcgcttagcggagattgcccggcgaaaccagccagaattgatcattgttgatcgcatgatgggcggtagacatgagaattatgtgacgccagaacgcaagattccttctttagaagaaatcccaacaaaagtttgggagagtaatatacctataggcaatgactggggctatgttccccatgacacctttaaaagcagccaagagttagtcgatacattaatcgatgtcgtcagtaaaggcggaaacttaattttaggagtgggtccaacaccagaaggaactttcacgaaagaagagacccagcgcctgcttgaagtgggtgattggttggaacaatatggggaaggcatttacgagacccgagctagaccagaagcgtggacggagaattggcatcttacctatagcaaagatcaaaaaacacattatgcctttcgcagtatcacaacaaatttgcagccgcgaatttttctgaaggagatccatgcagatgaaaaatccgtgatcacagatttagcaaccaatcaatcactgacgattcatggaacgggtgaaaacgcctatattgcttcatcagaagtgcatcagcctgaacttggagcagttggcattcgcatttctacacattgaagaaaaaatacacattgctttgaaagcgaattcatttcatatttagtatacaaaccaaaaacacaaggaggagtatgaatggaaacaacaacgatcagagagcctgtgtcagcatcaaaaagtaaaatcaaagaaatgaagactaaattaaaaaagagtcgacagttatatttgtttgtcctgcctgcttttttgattattctgattttttcttatgggccgatgtatggtgtgatcatcgcctttaaagactatatgccttctttgggaatattcgaaagtccttgggtagggttcaaacattttcaacgcttttttgattcttattacttctgggatctaatgaaaaatacattaggtatcagtttgtactctttgatcgtcggatttccgctaccgatcatccttgcactggctttgaatgaaatcaaggatggtccattcaaaaaaattacccagacagtcacgtatgccccaaactttatcgcagtagtggtaatggtcggaatggttattgcatttctgtctccttccactgggatcatcaatcactttctagattttatcggcgtgggaagaatcaattttatgactgaaccgcggtggttcaaaacaatctatgtattatcaggcgtctggcaaggcacaggttggggatcggttatttacttggcagcattgtctggagtggatactcagctgcatgaagctgccaccatcgatggtgcttctcggctccaaagagtttggtatatcaatattccaacgataatgccgaccatggtgattttactgatcatgagttttggtagtttgatgtcggtgggattcgaaaaaatcattttgatgcaaaacccattgaatatggaatcatcgaatgtcattgcaaccttcgtttatcagcaagggcttttagatgcacaatatagttttgcagcagctgttgggttattcaactcgttgatcaattccattctcttgattttagtcaacgggattgcgaaacggctgagcgattcgagtctcttatagaaaggtggtataggaatgaaaacaacttcattagtgaaagatacacgtgcagataaaatctttttggtttttgtttatttctttttagccatagcattactaatcgttctctatccattgatctatatcgttagtgcgtcgatttcaaatcctcatttagtcaactcgggggaaatgtggttattgccaaaaggggtcacctttgaaggctatcgaactctcttaggcaatagcagcatctggcgcggctacttaaatacgatctattacactgttttaggaacatccatcaatttgttggtgacactgccttgtgcttatgcactctccagagatgatttttatggcagaagagcttttaccaatttcatgctagtgacaatggttctttctgggggcttgatccctagctatttactgatccgcagcttagggatgttgaatacggtttgggctttggttatcccaggagctgtctctgtctataatgtggtcgttacgcggaccttttttcaaacgacgatcccaagagagatggaagaagcggcaatcgtggatggctgctcggattttcgtttattcatgcagatcgtactgcctttatctacgccaatcattgcagtcatggcacttttttacggggtagggcactggaacagtttcttcagcgcattgatctatctgtcagataaatccatgtatccattacaaatgattttacgggaaattttgattttacaagatatgtcatcaaatactgtcagcaatgtgacttccgaaatggccagtatgttatacagcaagcaacagttagcagaggtcatcaaatacggtgtcatgatcgtttcatcattaccggtcattattgtctatccatttttgcagaaatattttgtcaaaggcatgatggtaggatcaattaaaggataaaacatagaggaggaagaagatgggaatgaaaaaaattttaggagtaacaggggtgtttttgtgcagtgcacttttactcagtgggtgcgggaacacaaaaaaggaaacaaccggagaaaatgaaggggtagccatcaatcatgacagccaatttccgatcattaaagaaggcgaagaactgacgctgaacattatggcgccaggagtaggtatggcagaatgggaagatatgccgacgctgcaggattatcaagaaaaaacaggaatcaaactgacttatacgacacccccttctgctgactttagtaccaagttgaacttagcatttgcttcaggggatctgccggatatcgtttatggcgcaggatcgaattcgctcacttcttcaatggagatcgattatggttcccaaggaattctgctgccgttagaagaatatatcacgccggaaattatgcctaatctttatgcattgacccaagaagacccgtccatcttaaaatcgatcaccacaccagatggccatatttattcattgccgatgatttcgagaaatgcgacatctatttggtggcaaggtccgatgtggtacaacggaacgtggctagataagttgaatgtcaaggaactgccaaagacaacggatgaattgtatgatttgctgacacgattcaagaacgaagatcccaatggtaatggcaaagccgatgagattcctttgaccgatgtcgatatgaattcaacaagggtatggctgatggcagcttttgggttacggacacgaggcgttcaagtagatgatgatgtggtttcttatacaccaatctcggaaaactataaagcattccttgagtatatgaacaaattgtatagtgaaggtttgttggatgcggaagtttatggccaatccgacgaacagaaaaaagcaaaaggacaaaatgatcagttgggcttgttcgccgattacttcagcttctttacgacaggccgcagcgagattgaagcgatgaacgatgccatgttccaaccattgacttcaaaatggtcgccagaagcagtgattccaggaagtccacgaatttctcggggcacctttgccatcacaaatgtcaatccatcgccggaagcttcgatgcgctgggtggattacttctattctgaagaaggtacgaaatatatcgaacaaggacctgaaggcgttctttgggagtacaaagaaaacgctgacggccaaaaagtacgagtttatgcagaaggcattgatacagaaaatacagaagatgaacgtggcaagatcacaccagcatacgggttgacaacaccgaacattgttatcgatacgacaggtgaatatcaaatcttgaaatccgcggatgaacaacctgatactcgtttcagtgactgggtggccaaagaaacagcagataagatggatgacattgcggaagtgccatttccattactttatctgactgtagaagaaaatgataaagtggctgctacggctactgacttgacaacgtatgtcgaacaaatggaagccaaattcattacgggtgtcgagccaatcagtaattgggataaatatgtttcgacgatcgagtccatggggatcgatgactacatttccgtttaccaaacagcatatgatcgttggaaagagaactagagtcaaggcaataggagaagcgggcttggacaatttcttgtctacccgcttttttcctcctcagaaaccgagtaaaggagagaatacagcgtgcagttatttgaatttgaacgtatccgtaagattttatttcaattaaagaattaccggattcgctatcaggtgcctgttaatgacttgcagttaaagcaagaaaactgggcaccctatgtgcaaggaactttttttggagaaaagaattgttattacacaatgaaaggaacttttgaactaccggaagactggaaagagatgtcggttgctttgcaagtctattcttcgctctctgaatgggacaatacgacaaatccgcaaatgaaagtgttcttgaatgggaattacattcaggcaattgatgtcaaccatcgagaagtgcggttggatcccacggagctaacaggaacaatagccttacagatcgatattttttcgggacgagaagagaagaagtttccgctttacgtgaatctattggcgatcgatcctatcgttgagcaagtctggtttgatttctcgacgatttttgacagttggcgtgccattaggaaatttggcggagaagaacaaatctatcaaagctgtctgtcacaagctgccaatgcattagattttcgagccccctatacgccgcgattctatgaaggcctcacaaacgcgcaagaatgtctgcaagcgtgttacagccaagagattcgtcaaaaagtgaccgcagtcgggcatacccacatcgatctggcatggctttggacggcacagcaagcggttgaaaaaggagaacgcagttttcagaccgtattaaaattgatggatgaataccctgaatatacgtttctccaaagccaaccccagttatatcaagcgatcaaagaacaatatcctgagttatatcaggcaatcaaagagaagattaaatctggacgctgggaagtagaaggtgctatgtgggtagaagcagattgcaacttgacctccggtgaatcattggtaaggcagattttatacggcaaacgctttatcaaagaagagtttgatcatgagagtcagattttgtggctgccggatgtttttggctattccgctgcattgccacagatcttgcaaaagaccaatacaccttatttcatgacaactaaattgtcttggaatcaattcaatcagattccttatgattcgttttactggcaagggatcgatggcagcagagttttgactcactttattacaacgatcagtgaaggctacagtccaagaccctactacaccacttacaatgggcttttagacccttatacagtcaaaggcagctttgaacggtaccaacaaaaagatcagcatgatgagatcttgattgcatacggctatggagacggcggcggcggacctactagagagatgctggagacaaaacagcggttatcaaaaccactccctcagatgccagtgatcactggcgatcatgcgggcaaattttttgaccgattagccgcagcttttgctcattcagaagccccggtctggtttggcgaactctattttgagtaccatcgtgggacactgacctccatcggtaaaaataagaaagccaaccgcaaaggcgaatttttattgcaaactattgagaagctttacagtgcctatcgaagcgaagcgtatccgcaagagctcctcgaaaggctctggaaaagattgttgttcaatcaatttcacgatattttgccaggaagttcgattggcgaagtgtaccagcagacagaagaagagtatgctgctctttttgaagaaggcgagcaattgatccagtccctcgtggcaggaggaaccgccagtgatgcaaatcatcaggtggtctataatccattaggctttactcgtgatgccgtaatcaaagttgatagtccggcgattcaagaagattatctgacacagcgaaccgaagatggttgtttgctggtcaaagttccacaagtccctagcttaggtctgcgtcccctaacgttgagggagactatctcagaaccagtagaacaagagtgtgttccgttgactcgtcaactggaaacgaccgactttgtcgtaacatttaacgcggcatatgaaatgactgctctttttgacaaaagacaccagcgagaggtcttgccagcaggagaagtgatgaatcaattgattgcttatgaagacttaccgatggattatgatgcgtgggatatagacatctactacgatcgtaaagcttatccagtagaggatgtgactgacgcatcaatcgtcgagcaaggcgagattcgtgacacgatccgtatcaaacggacgtttgagcaatcaacgatcattcagctgatccatttctatcatggaaccggcaggatcgactttgagacaacggtcgattggcatcagcatcatcttttattgaaggcgcagttgccaattgccgtcaatacgctagatgccactttcgatatccaatttgggaatgtcaaacgtgccatccacaaaaataccacttgggatttggcacgttttgagagttgtgggcaaaaatgggtcgacttgtctgaagatggttatggcgtcagtgtgttgacggattgtaaatacggattcagcacagcttaccaaaaaattggtctctctcttatcaagtcggcgactgatccctatccagaagcagatcaaggacttcattcgtttacctattctctctatgttcatgaaggtgactggaaaaaaggacaaacgatggaagaagcgttggcactcaatgtaccagcatatgtattggcagattttgatcagcagcaagagcaatcttttttacaagtggatcacaataatgtgctgatcgattcggtcaaaaaggctgaagcagatgaagccatcgtggtacgtttgtatgaataccacaatcgcaaaacgacatgccgcttgaccgcagctaaaaaaatcaaacgagcagtgctaacgaatttattggaagaggaacagcaggagttagtggtcacgggcgtgtgccaccaagtggtgattcctttcaacccttatgaaattcaaacggtcaaggtctattttgactaatcggcatttttgatgataggagtttaaaatgatcgaagaaattgtaaagaagatgtccctaaaagaaaaaatcggccagttgaatcagcgattgtatggctggcaagtttatcagaaaaaggaaggaaaactttatttgacagactacttcaagtcggaagttgctcgctttggctcgattggctggatctacggcgttttccgagcagatccttggtcgggcaaggacgcaacaacgggtctctcggtggaagaatcacgggaagtcagccggatgattcaggactatttaaaagaacatactcgtcttggaatcccagcttttttgacagaagaatgtcctcatggtcatcaaggattagcagcaacaacactgccggtcaatttcagtacaggggctagttggaatcctgatctttatcagagcgtgcagacgttcgtggcacaagagttacgagctaaaggggcgcaagttgggctgatctctaccttggatatcgtacgagatcctaggtggggacgaaccgaggaatgtttcagtgaagatccctacttagccagttgttttacgcaagctgcggtcaagggaatgcaaggggaaatacttggtcatgaaccgacaacccatgtactggccgtgttaaaacattttgcagctcaaggttcaagtatgggcgggcacaatgcaggaccagtcaatattggggagcaagaattgcgagagattcatttacccgctatgctggcgggaattcaggcaggggcactagggtgcatggctgcttataatgattgggatggtgtcccttgtcacgcgaaccctcgcttacttcaagagattttgcgagaggaagccggctttgcaggagttgtgatggcagatggttgtgcgttggaccgtttagcggattggctaggaaacaaaccagaagcggcagcccgggccatgaacagcggcgtagacatcagtttatgggacaatgttttccctcagttggaagctgctgttgatcaagggttgattaagcaagaaaccattgatcgatccgtgatgcgcgttctgaaactgaaagagcagctaggactttttgacgaaccggtgcctacggtgtccgttccggatcaaaagcagtttcaagaaagtgcaactcgtttagcagaagaagccatcgttttgttgaaaaatgagcaagtcttaccgttaaagaaacaaagacaaacaattgctgttattggtcctcatagcaaaaacagctatcatcagctaggggactatactcctttcaaagaactgtctgagtgccgcaatctgtgggaggggttgctggaaatcaaggggaccgaaaccacttttattcaagcagatggctgcggcatcacagaaggaaccaaagagcaactgactgccgcatgccaagcggcagcaacagcggatcaaatcattttaacgattggcggctctagtattcgtgacttttcgacggattttgataagaatggagctgccttgcaaggatctgcggagatgaccagtggggaaaatatcgatctggcgtctttggcattgccagaatgtcaaaaacgattgattactgaattgaaaaaatttcagaaacctctgatcggtattgtcattgctggccgtcctcatctgttaagtgaggtcagtaccgcttttgatgcgttgctttttgcaggttatccagggcaatttggcggaagtgcgctagctcggattctttttggcgaaacgaatcccagtgggaaactagctgtttctattccagatgaaaatgggcagctgccagtttattacaactaccgtgaggctgctttccagagagattacacagattgttcaggaacccctcgttatgggtttggttatggtctaagctatgcagaatttatgcttaagggaatccatgcgcagtatgctccgcaagcaatccaaattaatggaacaatcgagaatctttcggtgatagcaggagctgaagtggtacaagtgtaccttcgcaattactcacagcaggtcttaccgcgtgtcaaagtgttatgcggttttcaaaaagtctttttgccagccaaaagcaccgtcgacttttctctaacagtttcttatgaaacgttgaaacggttgaacatttcaccaaatgaattgccagctgattttatcatccaagtcgaagcagccaatcagaaacaagtattcacgaagccattgaaacaagaagaaaatggaaaaggagagaaatcatgttaaaattcccggaaggatttttatggggagcagctgcttctgctcctcaaacggaaggcgctgcggcgattgatggcaaaagcccttcaacttgggataaatggttcgaattggagccagacaagttctacgatcacgtaggacctagtgatacttcgaatacctaccgacactttcgagaagatgtggcgctgatgaaagccatgaatctgaactcttatcggacgtcaattgcttggacacgactagtacctgatggaaagacggtcaaccctcaagcagtcaccttctatcgtgcctattttcaagaaatggtcgatcaaggaatcgaacctatcatcaatttgttccattttgatatgccgtggtggttaatggaaagaggtggttgggaagccagagaatcggtagattactttgccgcttacgctcgtatcgcctttgagcaatttggcgacattgtcaaaaaatgggccacattcaacgaacctttagttcatattgaatgcggatatatgggggatgcccattggcctaaagttcataattttaaacgagcgatccaagtaggctatcatacactgttagctcacgcaaaagcagtagctgcttttcgcgaacttgcgattcctaacggagagatagcgattatcttaaatttatcgcccgtctatccgaaaagtccgcagtctgctgatcttgaagctgctgaatgggcagacttactctatattcgcagttttttagactgtacagtcctcggacgatttccagaaaaattagtcgcgatgctgaaaaagtcaggtcttgctcctgtaacagaggagggggaccgagaactttttgccttaaatacggtggactttattggttgcaattactaccagccattacgagttcaagccccgattgcgccgaacgatccaatcacagggccgagggatctttttcgaggctatgattggccggacaaaaaaatcaaccctcatcgcggttgggaaatctttccgcaaggtatttatgacattgccatgcgtctaaagaatagctatggcacgattccttggtatatttctgaaaatggtatgggggtttctcaagaagaacgcttcgcaacgcaagagggggagattaatgacacctatcgcatcgaatttgtaacagatcatctcaaagaactgcagcgggcgatcgaagcaggagccccttgcttcggttatcatatgtggacatttatcgattgttggagctggctgaatgcgtataaaaatcgttatgggtattatcgagtagatttgacagatgatacccgaacaccaaaagcgtcgagcttttggatggcgcaagtagcaaaggacaatgggatcgattcagggaatggacctgattagccagcaaataaagcatgcttcagagggacgattggacctctggagcatgctttgagtgtttcaactgattttattttatgtttaagtttcgaccactgaatttagcaggcgcatttgacgatcagagatatttgtgacgatagtcagcaatggcctgtcttgattcgtagatattttgagccagctgttcatttttactcaaaaagacatagaacagcacatcaactgccaaaagatgagcaataatcgagttggttgctgcactgcgcatattggcttctttcggtctggaaacttgcagcggaacatctgctaatttcgaaagggaattactgccaaagcgagtcaaagatagaactggaatccccatctccttcgtaaactccgcaaggtgtaggatttcaggtgtttgaccactgtttgagacagcccagagcaaacattctttttcgtgtttgatcaattgaggcaacagcgaattatagtcggtttcgaaaataaccactttgcctaagcgagtccatttttgttggatatcttgagcaatcaaagaggaagcaccgataccgcatacgaagatccgattgcgggttttcagtaggtccgctgctgccagcattacttgttcttctaaaaggtccgcagtctcatgcatagtcacttgggcattatggctcaatttcgcagtaatatcatgaaaagattcgttcaatgcaacatctgcatagccaatgatctcctcatgggtttgtcgggagccagattccgcagaaagctgaatcttaagatcagttaggctggaaaagcctgttttctttgcaaaacgaacaactgtaggggcgctgatcccggtagcttgagccaactgactcgcagtcatcgaaggaactttttcagaattttttttgatgtaatcaaaaagttttttttcggaattggataattcgctctggatactttcaatgcgagaaaggacgctcataaggtcacctgctttaagaaatttctagatttagtataccataagttggagtgttgctttcattttaaaatgaaaagattcagcgaagaaacttgcatttttaggtagaataaagtaaagtaattacgtgtgaatacacgctacctgttacttggttcaacgagtcaccaacgttttactcagtcgcaggtgaaaaaagaaaaaagaggtgaaaaacatggcaattacgaaagaacgcaaaaacgaaatcatcaacaaatttgctcgtcatgaaggagatactggttctccagaagttcaaatcgctgttcttacagaagaaatcaaccatttgaacgaacatgcacgtatgcacaaaaaagaccaccattcataccgtggcctaatgaaaaaagttggtcaccgtcgtaacttattagcatacctacgtcaaaaagacgtacaacgttaccgcgaattgatccaagctttaggattacgtcgttaatcaaacaaagaaaagtgaggttcaacccgaatctcacttttttgctatgaatcactgcgactgggcggcacaagccgtacagagcagatgatgaatagtactaggcgactaaccaggagcgtagtcacccgagcggaatcactgcgactgggcggcacaagccgtacagagcagatgatgaatagtactaggcgactaaccaggagcgtagtcacccgagcggaatcactgcgactgggcggcacaagccgtacagagcagatgatgaatagtactaggcgactaataatagtggccccatctttttaacaaactcaattagcgggacttgactggtgaatcaaacccgcaactaaaaaagaatctctgagacacggcgagcagcttcctactaaccaaatgaaagcagcggaagcaccgatccacttttttcatttgtttagtagtgacttgcttggctcagaaaaaaaggagcagatcatgacagaaaaacaagtattcaaaacgatttggggcgggcgtccgctacaagttgaagttggccaattagccaaacaagcaaatggcgcagtactcgtccgctatggcgatacagtagttcttagtgcagccgttgcttcaaaagaagcaaaagatacagacttcttccctttaacgatcaattatgaagaaaaaatgtacgcagtcgggaaagttcctggtggtttcatcaaacgtgaaggtcgtccaagtaccgaagcaacattgactgctcgtttgatcgaccgtccaatccgtccaatgtttgcggatggtttccgaaatgaagtccaagtgacaaacattgtcatgagtgtggaacaagattgctcaccagcaatggctgcaatgctaggctcttctttagcgttgtctatttccgatgtgccttttgacggaccaatcgctggtgttgaagttggccgtgtcaatggggaatatgtgttgaatccaaccgttgaacaagcagagcaaacagatatcgaattgacggttgctggtacgaaaaaagccatcaacatggtagaatcaggagcgaaagaagtttctgaagatgatatgttaggcgctttgctgttcggttttgaagcaatcaaagaattagttgttttccaagaagaaatcgttgcagcagtcggtaaaccaaaaatggaagtgactttgcttcaagtagatgctgacttgaaaaaagaaattttcgatggctactatcaaacaatgaaaacggctgttatgaccgaagaaaaattggctcgtgaagacgagatcgacaacgtcaaagaaacagttaaagaagtttatgcagaaaaatttgcgggtcatgaggatgaagcgcagcttctaaaagaagtgaaacaaatcgcagaagaccttgaaaaagatgttgtccgtgaattgatcacgatcgacaaaattcgtcccgatggccggaaattggatgaaattcgtccattagcctcagaagtcggtctgttgcctcgtgttcatggttcaggactattcactcgtgggcaaacgcaagcattatctgcttgtacattggcaccattgggtgaacatcaaatcattgatggtttaggggtagaagaatcaaaacggttcatccaccactataatttcccgcagttttcagttggttcaacaggacgtgccggttctccaggccgtcgtgagatcggacatggcgctttaggtgaacgtgccttggcgcaagtaatcccaagtgaagaggatttcccttacacaatccgtttagtggcagaagtattagaatccaatggttcatcctcacaagcaagtatttgtgcgggtacattggcattgatggatgctggtgttccaatcaaagcccctgttgctggtatcgcgatgggacttgtctctgatggcgaaaactatacgatcttgaccgacatccaaggattggaagatcatttaggcgatatggactttaaagttgccggaacaaaagatggaatcacagccttacaaatggatatcaagatccaaggaatcaccgagcaaatcttaactgaagctctatcgcaagcgaaaaaagcacggatggaaatcttaaatgaattgacttcaactattgctgcgccacgggaagaattgagtccatacgcaccgaagatcgagatgatccaaatcgacccagccaaaatcaaagatgtgattggtaaaggtggcgacacgatcaatggcatcattgatgaaacaggcgtgaagatcgacatcgatcaagacggaaaagtatcaattgcttcttctgatgcggaaatgatcaagaaagctattaagatcattgaagatctaacaaaagaagtcaaagttggcgaagtttatttaggaaaagttgttcgtgttgaaaaattcggcgcttttgtcaacttgatcaaaggcaaagatgggttagttcacatttctcaacttgcaaatgaacgggtcaacaaagtagaagatgttgtcaaagaaggcgatgaagttcttgtgaaagtcacagagatcgacaaacaaggtcgaattaatttgtctcgcaaagcattattgactgacgataaagcagagaagaaataattttcttaactagttatccgcaagagaagattttgcaaacgtaaatcaacgtccaaccccccagtaatcgattcgattactggggggtttttacgacataaggcacagacatttcgctgataataaggtaaactgactcaaagaggtcgggcaatcaaaaattcaaaaaacgtatagaaggtgaaaaaatgaaagccacacagggaagtgtttttcgacgacgagaggccttgatcacctacttagataagtatgattatgggactgtttcagaattagcggatcgatttcaagtatcagaagtgacgattcgcagggatttgttgtttctggaaaaaaagcagttgattgaacgttattatggcggcgtgaaacggatcaagaaatcagaaaaaagagaatcccagcaacttggatcggtagaagaatttccttggcagcgactgcttccaccgttacaccttttgctgcaagaaaagaaattgatttttgtgggggctggacgctggtcgaaagaattgatccacgcagttgctgattttgatttaacgattgtgaccaatgaccattccgcattgattgatctaaaaccaggacgggcgattgtttgtctgtgtggaggagaagtggaaagcaactccactgcgttagtcggagatatagcgacactggctttcagcaaatatacggctgatttgtgtttgattgaagcctcaggaatcgactcccatgaaatcacaacaacgacactaagtgaatcctttgtgtatcggacgatgcttcagcatactcaaggagagaaaatcatctatacggaaggagaaaatatcggccatgtccgaggatttatgattgatcgtacgtttatggcgaatcgcttgtttagcaataggcaacttacagagatcgagacggcgcaattttcttctcaaggtctgcagttttcgctgctatgattttaatttggcattgaagcttttctcagacaatcaattaaggagaatcgttcataaatattctttcatgaacagttcttgtccggctattgcttttgatcaaggagacgattatcctaaataccagaaagcgatttactaaaaaagacaggagaacatcatgacatcaaaatttccaacagattttttatggggagcatccatttccgcacatcaaacagaaggagcttatttagcggatggtaaaggactaagtgttcaagatactcgtccccgagacaataacgagatcgccgattttacagtagcggtggatcattaccatcggtacaaggaagatatcgccttgttagcagaactaggaatcaaagtttttcgcttttcaattgcatggtcacggatctaccctgaggggcggggaagtgttaaccagaaaggattggaccattatagtgctgtcatcgacgaactgttgaagcagggaatccaaccatttattacgttaaatcattttgatttaccacaagcattggaagatcaaggcggctggacaaatcgcagtacagttgaagcttttgaaacctatgctaagacattgttcaacgcttatggtgatcgggtgacccattggttgacgatcaatgaaccgaatatcatgctcttagtcgatcgcaagatactaggcaaaacgattgctctacctgagaagtaccagcaattccatcatctgatgattgctgaaaagcttgccttcaaacattgccatgaactcgttccaaatggaaaaattggaccagtccctaatatctcgcttgtttatgcagcaaccagcaagccggaagacaatcaggcggccctttatttcaatagcgttcggaattgggcgtatttagattttgcctgcttaggacgctacaatacagtctttcaagattacttgaatcaaaatggggtgaagatcactatccacccagaggatcaggctttgatgaccagtgccttcccagactttgtagctatgaatttctatacaacggtcacagttgaacagccaacgatggaaggagacatgacgaatgggatcagtgatcaacaaagtgaagacatcatggaacgagggttttataaaggatttacgaatccctatttgaagaaaaatgcgtttaactggaccattgatcctctgggcttaaaaacgactttgcaaacactctatgatcgctaccatctaccaatcctcatcacagaaaacggtttgggagcagaagatcatctggaagaaaacggcgcagtccatgattcttaccgtatcgactatttgcagcagcacatccagcaatgtctagcagctatcgagtcaggagtggaattgattggctatagtccttggtctgcgatcgatttgatcagtgtccatgaaggcatcaaaaagcgctatggttttatttatgtggatcggaatgatgccgatgaaaaagagcaaaagcgtgtgaaaaaagatagtttttactggtatcaaaagttgatcgaaaacggacattgggagggataagcaatgaatcatgtctttacttttttagagcagcgattgatgccgccattaaataaagtcgctaacttgcgttttatccgggcaattatgcaagcgggagtcatcacggttcctttcacgatcgttggctcgatttttttgatcatcaataacctgcctcaaattattccgccgctggccagcttttttgaacagacgattttgaaattttccccgctttatagtgtcgcgacaactatgtctatcggctcgatcgcactcttttattgtttagccactgcgtattatttaacggacatctatcgcaaagaagaaaaactccaattgagcagctttgttggcgcaattcttgggttgtttgcatttttgatgacgatcattcaagtcgatatttcagatagtggggcacaattgcttcaaacaactggagagacagctatcatctataatggtgtagcacttggttcttgggtgacacggtttagtggggtcggtatttttatcggtatccttacggcggtgctggcaacccaagtctatcgtttttgtgttaaaaagaaaatcacgatccaaatgccagcgggagtaccagatggggtcagtaaagcatttgcttccctgattccagcgattattattgcttttttgatgattctgatcaatggctgtttagccgtttttcataccgacttgcatggtttgttgtcaaaaccatttgaatttgtaaaagatttgacaggttcttggctagggatcattgtaatcatgttgttgattcatttgttgtgggccgttggtgttcacggaacagccgtcatcaaaaacagttttatcaatcctattttattagttgctttaaccgaaaacatcgatggagcaaccaacatttttgccggtgattttgtcaatatgtacatttttattggcggtgctggcagtacgttagggttggtcttgttgatgctgtttcgagctaaatcccaacagttgaaagtattgggcaaagcggcgatccttccaggattgttcaatatcaatgaaccagtgatctttggtgcgccaatcgtctataatccttatttgattattccttttattgtgacaccgctgatcaatgtgacgattgcttattttgctacatcctttggctttgtagctaaagtgatcaccgggattccttggatctcacctgttgggattggagcatttcttggaactggcggtgattttcgcggaatcttgatcgctatccttaatttattgatttcggttgtctgctattatccatttttccgaatgtacgatagtaaactttttgcggagcagcaagcaaacgaagcagaagcgactctccatgatcagtagacaaaaagagcgtgggacaaaagtaaaaaacacttttgtcccacgctctaaacacgtctaaatggcggaagcagaagcaactccgagaaattaatcgaactaccccaaaatttgaaaagcaatttccgtgtattcctccttattttgcggagtttaacatttctgtcccagcctcttttttagcgaaaactataatccgacaacgaaatatgccgggcatgacaccagtctttgacaggaccggagaaaattagcggtacattggtcaaatcctgtgtcagggtttgtccgaccatggtgtagagcagctgaagctgttctttccaagactggatggtggcaatcgtttcttcaggtcctttatctaagagcatggtcaaaatcgtagcagagattccgacacttttggcaccaagacataaagctttgaaaatatcaaaggcatctcgaatccctcctgaagcgattgtcgtgaaggagtgttgcacttcgttggcttctagtaaagaaataaccgtcgattggccgaagtgattcaagtaagccatttctcgtttttttctgcgggcattttcaatttgggtaaaactcgttccgccgctaccagcaacatcgatcgtttgtacgcctaccgaaatcaattgctgaatagtctctcgggtcataccaaaaccgacttcttttacgacaactggtactggagccgcctttacgatttgttccagcagacttagccaattgctgaattcacggtccccttctggcatcaccaattcttgaggggcattcagatggatctgtaaggcatcggcttcaaataagtcgatcgcacgcaaggcattttcaacggaactaccagcaccgacatttgctaaaagaaagccctctggattgacttggcgaacgacttggaacgtgtcggacagcgctgggtcttttaatgcagctgagacagaaccagtcgccatcatcaggtcacaagctttcgcaacttcagccaagtcttggttgatttttttgcttttctcacttccgcctgtcatggcgttgatgaaaaaaggggtagcgaaagagcggccaaagagttccgtttccaaagtgacttgtgcgctatcgatctcgggaaaggactggtgaataatttgaaccgcatcaaaatcattcaaccgtggcttgtgaaaggcttttgccaatgagacgtgttcatcttttcgattcattaaatctcctcccgataatgatagacatgcagcggcaatggaataatgtcggctttttcccaagcgctcatcaatggtaagatcccggttttttgatcgacgatcacaatgccgcaatccccgccgccagcgcctgaagacttggcggccccgcgataggtttctgctaagtcacatagtttctttaaagcgggtgtttcaatggttacaccagtcagactagataatcctacaagtaattttcgattttcggtaatcatttttttgattgttcggctgtcttcatttaaaaagccatcaatcaaacgattgacacagtctttgctgtctgccaaaaatttggcatagcccttttctttggcttcttttgattggtagacttggtcaactaaatcagaagtggaagcaggactacctgtccacccaatcaacaggcgcaatgattttgggacaatcaatggacggatcgaaagctctggccaatcactggtcaatagctgagtcaatgtccattcctgctgttttcgtaagacccactcatgatcaaatgtggaaaaagccagccagccgccatagcaagaagcagcaatgtcaccacacgagccattcccttgcacggccaaatgggccaatgcggcgatcttgaattgcgtcaagcgatccatttttagatcatagtagaggttgagtgctttgacggtagcaacggtcactgcaccgctagaaccaagtccatattttcgaccgttggaattatctaactcactcgttacttttaagtcataaaaagagagcagggttcctttttcttgagcgtatttttctgttagacgaatagcagctagaatgtaatgaaaaggattttctcggtggtccagtactagttcgccattgcggcgggtccagcggatcggcaagtcactgtactgggcagattggatactgccgtttttgcgggcgccttcgatcgtcacattgatgaattgatccaccgcaacgatgatcgctggatgtccaggttcaacgaccgcatactcacctgcaataaataatttgccggggactgagatttctatcatttcgacactccttcatttgtcatagacggatcggtcactgtcattggtaaatcaaccaacccttgtcctgcgtgagcaacgattaattgttcaggatgaaaatcttttttcagctgggttaatatagcttcttcgtcttttctttgacaaagcactttgacatttggtccggcatccatcgtaaagtagcaggccagccctttttgacgcaaggaacggacgcaatccattgctcgcaaggattcaggagaccagtaggtgaacggtggagtcgccgccatagtagtggcatgcatttttagggcattggcttctgtcgtttcacctaataactgaaagtctttttcgcggatggcttgctttaactttttcaaatcgtgtggtgtgctttctagccaaccagaataatagctggaagtctctacagtccgacgcatcccgtcacgactggaaacatcttttgctttgtcgttgatcaaaatgaaaagcatacttagctctttttcccagccttccgaagcaatcggtgttgcgtaagacgtgtcatcatcaccagtatgccattcgacaaagccgccaaaaatactgcgacaagcagagccagatccccgccgagcgagacgggatagttctgtttgtgataattgtaagtcaagtgctgcgttacaggctccggctaaagcagctagtccactagcagatgaagcaagaccagcagctgttggaacgaaattgcggctgttgacttgcgcgaaaaaaggacaattggcttttgcgcgtacaagatccaaaaaagcggagattttcttcgttgcagcctcactctgctgtttgtcatccaggaaaaaacggtcttgagtatattcctctgaaaaggtaacagaggtttctgtatagaaagcatctaacgtcaaagataagctgttattcattggcaagatcagtgtttcgttctccttgccccaatatttgatcaaagcaatattcgtgtaggctcgcgcctttcctttatacatgttcgtaagctcctaatccttgaatccaagtggcatgggcgccattggacaataaaatacggctgatcacttcagcctgtgtttttgtttgagtcaaagcgatcatacagccaccgcggccaccgcccgtcagctttgcgccaaaagcgccgttggctaatgccagtgacacgagatcgtccaggttttgattgctgacacctagttgccggagggtctcatgtgcgtgggtcattgcctgacctagctgcgtcagctgattatgtaagatagcttctttagcggtctttgctaaagaacctaagcggctgatagcctgactcgtttggtgtttttgcgtttcaaacagatgcgcgacgcttttgacagctgtgcgggtctgacctttgatccctgtatcggcgactaacaaaaagccatcgatcgtcaatggaaaagaagtaatcggctgccctttggtaaagtagatcgcctcgttgccgcttgttgctgcagcatcaataccgctaggatttccatgcgcgattttctcagaaaaatcgacataatccaatagccgttctttttttaactctttgtgctgccaatcaaaaaaggcccgagtcaacgcaactgcaactgccgcacttgaacccattcctcgttctgaagggattgtactaacgatcgaaacagaaaagggaccggtttgatggtcttgctgcaagcgatgaagaagttctttcacattttttaaatgcgaaggagcttcttctagtgggccgtggtaataattggaggttaaatcattcgttaggctggcagtgatcgtcacgtggacctttgcgccagcaaatggaaaagcgatggcgggttcaccatagacgaccgaatgttcacccattaatatgattttccctgtagctatgccagtaccgagtgacattcattatcctcatttctcttagaactgcagcagaagtcaaaagaatgtctcagaggaagcagcaggcaaaaaaataaaggttcccctttgatcctgtgagtcattcttttaaactaagctgcaatctacttaataattactagtgatttcatcatagatccttgtttttccgttagaacagaaaagttcgcagaaaaacgaataaaagattctttcttattttactagaagaaggctgtttcgttaagcattccgaaaaagaaatcgtaaaaaactgaaaatatttaaacttttattgaaaattttttgtttttatgcttcaaaagcgctgggttgacgatacaatatctagtagtgtatagttgattacgcaaatgaaacatacaatatttagtgatgagtgagttgggggatatgagcgtgatcgtattagcaggaactatcggcgcaggaaaatcaagtttaactgcattgttagctgatcatttaggcagtcaagcattttatgagtcaatcgatgataatgaagtgctgccgttgttttatgccgatccaaataaatatgcttttttattgcagatttattttttgaataaacgttttgatagtatcaaaaaagcattgaatgatgataataatgtattggatcgatccatttatgaagattcactgcttttccatttgaatgctgatttagggcgagcaacggatacagaagttcgggtttatgatgatttattggccaacatgttggaagaattgccttatgcagctcataaaaaacatccagatttattggtccatattcgggtttcttttgaaactatgttagaacggatcaataaacggggacgggaatatgaacagttatcctttgatcctaccttgtatgactattatcaagaattgaatctacggtatgatcaatggtatgaagaataccaagaaagtccaaaaatccaaatcgacggcgatcaattcaactttgttgaagatccagaagcagcccaaaaggtattagcgatggtcgacgaagcactggcaaaagtgcgcaaataaagcaacagctggagtccagcccataaaagtggggattccagctgttttcttttataatagaagaaagcgaacatgtaacgtgtggagggaaaccagtggaaaaaaaacgattttacaatggccgttatgaatggattcaagtggatcaacaagacagtagcagtattgcgcgtttacaaagacagcaccagttgactgatgagatgttaacttactcattagacaagaatgaacgtgcccgtgtggagttcgatactgatgatcaagcattgttgttggtgttcaacgtacctcaacaagaaaagaaagacaatcattttgaaacaagtccgatgacgtttatcttaaaaaaagatcggctgtttactttttcttcgagaaatacacaatatgtgattccgatgatggaacggatactcgtgcaaaatcctttgcaaacaccgattcattttctttttaatagtctttttttgatctcaggaactttttttcctttagtcgaagaagtcaatagcgatcgcgtgcatctcaatcaacggctgcgggaaaagaccaccaataaaaatttgttggagatgtctgacttggagatcggactcgtttatctggtttcggcaacgaaacaaaatgccgttttattagaacagatcaaagctttgtcgttctttcgtttaatggacgacaatgaaaaagagcagttggatgatgcactgatcgaagcgaaacaagccgttgaaatgactcagttagcgtttcaaattctggaacaattgtcaggtacgtacaataatttgttgaacaacaacttgaacgacacgatgaaattcctgactgtttggtcgttgttgctgacggtaccatcgatcgttaccagcttctttggcatgaacgttccattgcccttcacgaataccgtgtttggctggggaatcgctctgctgatcagtttagtcttgtcaggatggatgttgattgcactctggcgcagaatcaagtgatgcttcagtcaatcactagacctaaccccgctgcaatcactaatgcttgttcttggtcaacgatcaatccccgcaacaattcttgcgaaagagcgattttctggaaaggattggtccgcagatccagctgatagagtttggttcggaaccaattactgtttgtcagctgattgtgctgcaactggagatttttccattggacttcgtaaaattctgtgtcattcagctggcactctgcaaagcggatcgttttgagattggtgttgctgaaggaagcaaaattgccgacgcaagattcaaatgtacagtcacgaaaataactttctgcaaaatttgtaccggtcagcttgcagtttttgaagtgtacttgatgaaagctagcgcccaaacattccatgttggaaaagtcgcagttttcaaagaaaacattttggcattcccaatgctctagtcttgtcttttgcatggtgacctttttcaagtggcactgttttaaaatgagacccgtacaagcgtcataactggcatcagtttctgtaaaaaaagcttgttcaaaaatttcttcatcttcaagataaaaatcttttgtttctgagtattcaataatcggtaaaagaggatccggctgcttttttttcattttgcacctcaaaattttgtttttttaatagtataccatgttttgagcgatgccttttgcagtgcaaagatgtttgatggatagattgtgaatttaattcaataggctaactttagctgctgaaatagcaaggttttatgaaaaataaatacgcttatattcacaaggttatgaattgttttaagaaaaatcttcatttcagaagcataattcaaggataattcggcaataaccagtaaaaactgtcatttttttaacggtttgcgaaaatcttgatagtttttaaattcacaatgtagctataatgaaaccataaacaaaagggggaaatttttccatgacaaaaacagtgattattggtgcgaaccacgcagggattgccgcagcaaataccttattagacaattaccaagatcaagaagttgtaatgatcgatcggaatacaaacctcagttaccttggttgtgggactgcattatgggttggacgtcaaatcgattcgtatgaaggcttattctatacaaaacgggaagattttgaggcaaagggagcaaaaatctatatggaaacaactgttgaccatattgattttgagaaaaaaacggttcatgcagtaacaaaagatggtgaagaagtggtagaaacatatgacaaacttgttttagcaacaggttcagtaccaatttcgccaaaagtacctggtcgtgatttagccaatattcatttcttgaagagattccaagatggccaatctgtggataaagaactagcagctgaagaagtaaaaaatgttgctgtcatcggggccggctatattggagtggaaattgcagaagctgcaaaacgtcgtggtaaaaacgttcttttatttgatgccgctaaccgtgcattaccaaactactatgacaaatggttcacggatgacatggatcaaaacttagcagagcatgggatcgaattgcactttggtgaattagctcgagaatacaaaggaaccgacaaagtagaagcagtggtaacggataatggagaatatccagtggatcttgtgatcaatgcgatcggcttcttgccaaacaatacattaggcaaagagcacttggaactatttacgaatggtgcctacttggtagaccgtcaccaacaaacaagtgacccagatgtttttgcggttggagactgtgcaacggtttattcaaatgcattgcaacaaacgacctacatcgctttagcaacaaatgccgttcgctcagggatcgtagctggccataacattggcggtacatcattggaatcaactggggtccaaggatcaaacggaatctcaatctttggttacaacatggtttctaccggtctttccgtagaagcagcagaacgtaacggtgtgaaagtgaagtattcagattatgaagatacgcaaaaacctggattcatgaaagaaaacgataccgtgaaaatccggattgtttacgaagaagaatcacgtcgggtgattggtgcccaaatggcatcacgtacttcagaaatcgctatgggaattcacatgttctcattagcaattgaagaaggtgtaaccatcgacaagatgaaattacttgatatcttcttcttaccacacttcaatcaaccatacaactacatcacaatggctgcattgaaagctgaataataaatagctgagggagctgtgacaaaaatcttgtcgcagcttcttttttcaaataaacgattagaagtagcttctttggaaccaagccgaaacttcaggtggctggtcacttttgttaagcgctcttttttgaaataatcatgaaaatcattgacaagaactaaaaaaagcagtatactataaaagttgagaaattaaagcagaagcacccgcttctcgcctgagtgactgtatcgctgggcagaataggattcctacattttgtgtatggagtacgtgcgggttcgtgaagaactcgttttttttattgtctgatttcgaatcgacaagcttttctttctctcaaaaaactcggaggtgaatgaccatagcaaaggatatgatggtaaacgacggcattcgtgcacgtgaattgcgtttgattgatcaaaacggcgaacaacttggtgtaaagagtaaagctgaagcattgcaaattgcagaacgagcaaaccttgatgtggtattggtggcaccaaatgcgaaaccaccggtagcaagaattatggattacggaaaatatcgttttgagcaacagaagaaagaccgtgaagctcgtaaaaaacaaaaagtaatcaacattaaagaggttcgtttaagtccaacgatcgacgtcaatgatttcaacacaaagttgcgtaatgcacgtaaattccttgaaaaaggggacaaagtaaaagcttcgatccgtttcaaaggccgtgccattacccataaagagattggtcagaaagtgttggatcgtttggctgaagaaacagctgatttagcatccgttgaacaaaaaccaaaaatggatggacgcagcatgttcttagtattatcgccaaaaaatgataaataatgactcactgagtttcagtttaaagtcagataacgaaagattttgaggaggaaattagttatgccaaaacaaaaaacacaccgcggattagcaaaacgcgtaaaacgtactggcggcggcggattgaaacgcttccgtgcatttactagccaccgtttccacggtaaaacaaaaaaacaacgtcgtcaattgcgtaaagcttctatggtttcagctggcgattacaaacgtatccgtcaacaattagcacgcatgaaataattgcgtcccaggctttacaaattcaaacaactatcgattttcatattaggaggaattatacatggcacgtgttaaaggtggaacagtaactcgtaaacgtcgtaaaaaagtgctaaaattagcaaaaggttactacggttctaaacacactttatttaaaacagcaaaagaacaagtaatgaattcatacaactacgcataccgcgatcgtcgtcaaaagaaacgcgacttccgcaaattgtggattgctcgtatcaacgcagcggctcgtatgaatggcttaagctactcaaaattgatgcacggtttgaaattagctgaaatcgacatcaaccgcaaaatgttagctgacttggctgtaaacgatgcaacagcatttactgcattggctgaccaagcaaaagacgctttaaacaaataaactcacgttgttctacaacgattgaacccgctcaatgagcgggttttttgtttcttccgctaagcaaaataccaaattcgcttgactaatggtatagtagtctacaataaaatcggattcctgttaaggctgggaggatatcaaatgaaactagtaacgaggaatgaagtattggaagaatcaaaggcagtcctaaaaatcatcgcgggtaatagtttgttgggatttgcttatgcgaaatggatgaaacctaatgggatcatcaatggtggtgtcactagtatggcgatgattttagaaaaggtgaccaatgtaccgatcgtttatttgacatctggtattacgacccttctgctggttttttgttggctatttttaggaaaagccaattttttcaagtccattatcagcagtgtttttataatttattttttgctcttttttattatatgaagattgattttcaagtaaacctaatgcttgatttcttatttgcgagcttgttcatagcggtagggtactattgctgcatcacggctaacgcttcaactgttgggatggatgtgattgccatggctatcaacaaaaagcggcctgattttagtattgctcggggtatccgctatatcaactttatggtattaatattaggatttttgacttatggcttcaaatcagtagtaattggattactatttagttttgtcaattcttatctattagattttttgttgaaaagaagcagtcggtgatctatttggtgattcttgcttcctttcatccgcaacaaaaacgacaaactaacagtattgatccaattcaaattggggttatttcattaattgactcgcctcataaatctcttgtttatacggagatttatgaggtgttttttgttttttgtctatcaacgaatagagagaaaccgttaaaaatgcgcaatatgacaaaataagttgatttattttgaattttgtctttttcataaacaggtcaataagtgaaagagatttctcaatcccaaatcatgtgatttttaacacatatttcagaaaaaaacgaagtaaaatgtccttatttattaaaaaaatgctcaagtctgagataaaaatcgcttttatccattcatttccaggcgcaaaatgataagaattactccttttttaaaaagattactaagtaagaatgagactcaaatacttattttttgaaaggattttgtcagttcctaatagcaaaaatatccgataatctgtttagataatctttgcacttttttaggagtgatctttatgtaaaacgaaaatgttggattggttgtttaggcatgtgtaggttaggaaagatttaaaaaaatatgaaagaaggtacagaaatgaaacgaaagaaaaaattagttacaaagttcgttgttgcaacaactcttttcacagcaggtagtttggtggttccagctgttggcactttatctgcctatgcagcgactacaggtcctgttgcagataatactagccctcgttccattacactttggaaatatgaagtgaaagatctatctgaactgggtgatcgtggcgatggagaaaaggatgatacagttacaaagtagccgttagcagggatcaaattccgcatacaacgggtaacggcaatcggtgatgctgctttaacgaatccattagatcaaaaagaaggaaccgattatacgattgacaacacatttactgctcaaacagtaacgacaggagcagatgggtctgtcaaagcgaatttgggtagcggcaatgcggcagatggcatttatttagttaccgaattagaagatgaccgtggtgtctctcctgccgttgcaaaaccagcagatccattctttgtgcaagtacctcaaacggaccgtgatgatctaggctcattaatctatgatgtagtcgttcaaccgaagaacattatggaatctttgcttgaaccagataagaccgttgaagaaggaaaaggtttctccaataaagcaggaaatcatttcacttgggaagccaatgccactcttccaagcggactctatcaaattgcagcgaaagacatggttattacaccagtttatgacaaagatggcaatcaagttgcggatattccagtctctgcaggcgacgaaatttacgctgactactatacgattcgcgatacattgaacgaaaagattttgttggatgggttaactgttaatacgaagacagattccagtgactgggtagcacttgaatttggcacagattataccgtcttagactagataagcatcatttccattgtttcgcgcgggaatgtgctatactagatgcttgtaatcgcaccaagaaccggtgcttgaaagaaggagcataagaaatgaaaaatttaaaagttcaagacctgattgctgtcgggatatatacagctatttattttttattgatgagtttttgtctgctgattttacggtttgttattccaggatttcataatttattcattccagccgttacagcacttttttctggggtcatttatctattgatgttgaataaagtaccaaagtttggcgcgatcaccatcatgggcagtgtggtaggtctcttttttttgatttcaggtcactttccgctagcctttatgccgaatattttatgtgcagtactggcagatacgattcagtataaaagcaagtggaaaggaagtctcaagacaactattagttataccgtattcagctttggtttaatgggtcccatcttgccattgtggttcatgaaaaatgcgtatattgattcgctagttgctcgtggaaaagaccaaagctatattgcaggggtctttgctcatacttccacagcgatgctggtgatttgcgggctcgctgtactggttgcttcgattgtcgggataggcctcggtgctcgtctatatcaaaaacatttccaaccaacgttgcatcaaacaaacgggagatcgatgtgactaggctctcacttgaccccagatgcaaattatttgtgacattctttgcaagtgtcacattgatgatttcattgacgtggacaaaagagttgattgtgatcagctttttgtttatcttgtttctacttagcggtttctggcgaaagggattgttgtttttcgggctgtttctattattgtctttggtagaaggtttttttgcagggcaaaacaattcaatagtaaccaccctgctggatttcttttccgtagggtatcgccgattgttaccgacgatcatggcagccgtatttgcgatgagtgggacgaaaatcagtgaatggttagctgctttgcaaaaaatccgcattccctcgtttttgctggtaccgctggccgtactgtttcgattttttccaacattgttgcaagatgtcaaaagtattcgccaagcgatgcgctttcgcggaattgctttgaacggctggtcctatgtaagacatcctctacagacggtggagtattttttgattcctttattgatgtctgcagaaaatactgccacagaattgtcagcgaccgcgttagtaagaggcctgtcggctaaaaatcctcatacatcggtttatacactgcggttgaaacttgctgattatgtagtgtttggtactgtgttactacttatttttttgtttgtaaggatgtgaaggaatgatcaccatcgaaaaactatctcttaaacggggcacccagcaggtattgaaagatgtctcttgtcagatttttgctggtgaagtcgtcgtgttatgcggccaaagcggtagcggtaagtcaaccttgttgaatgttctcaatggcttgattcctgaactatatccagcagaaatgacgggggctgttcaagtggcaggggattctttgccgacggaagactttcccgcctacgccagaaaaatcggtgttgtttttcaaaatcccaaaacacaattttttacaacagatgtttattctgaactggcgtttacaatggaaaatgcagggatagagccagtagaaatacgaaaacggatcaaagaagcggcagaacaattttctttgtcagaattgttggatgcaagtgttttcgaactgtctggtggcgaaaagcagcgagtagcaatcgcttgtgcaacgatgctttctcatgatctctttttgttcgatgaaccttccagtaatcttgatgaagaagcactacaaaaaattgccgcagcgatccgccttttgaaagagcaagggaagacgatcgtcattgcagagcaccgattgtcctacttgacggggattgcggatcgttacttattactagcagaagggcgcttggtcacagagtataccagtgaagcattgctttctcataccccgcaacagattcacaatctcggattaaggcggatcaacgagccgcagttcgagttggcaatcaacgaaacagagggagcgagtttctcagctgatctgattgcgacgaatctccaagtcacttatcgacgccaacagcaaccagctcttgatattgcgaaacttgttgtgcctacgcgacaagtcgtgggtttgattggcccgaacggtgctggcaaatcgacattgtttcaagtgttcgctggcttaaaaaaatgttcagcagctcaattttggctgcatggtcaaccaatcaatcaaaaacagttattgcgagaaagttttctggttatgcaagatgtgaacctgcagcttttttttgaatctgtcgaaaaagaattgttggcaaaagctgccagaccggaacgttttgaacaagtcgtgactttgttggaactagagcatttactgcgaagacatccacaatctttgtccggtggcgaaaagcagcgagtcgcgatcggcagtgcattgctttcaggtaaacgcttgttgtttttcgatgaaccgactagcggattagacctgaaacaaatggaagaggtcggaaatctgctgcaggaagttgccaaagaagtcgatctgttagccgtgatcagtcatgataaagagtttttggatgaaacctgcccttacgtgatccaactcgaacagggaaagttagttgatacctatcagttagcgacaaatgggggataaaagaaaagcggagtgagcattggttcactccgtttttgtctgaacatgaaaaaatcttcatgatctttttctttcaatccgttaggaagtttttacaaaatccgttatgatagaagcaaaaataggaggagagcagatggccttgagaatcttgatagtggaagacgaagaaagtttagccagttttatccagactgagttgacttttgaggggtacgacacggtatgggccaaagatggccaagaggcattgaccttgttcaatcagcaaactgatctgtttgatctgattttgttggattggatgctgccaatctatgatggcatcacggtggcgcggcgaattcgcaaagaaagcgatattccgattttgatgatgacagccagaaatcaaactgccgatgtcgtgactggtcttgacgttggcctagatgattatttaacgaagccctttgaaatcgaagaactgtttgcccggattcgcgtgattgagcgacggttgcagcgggaagcccaacagcaaaagaaccaacaaaatcagttggtggtaggcgagttgatgatggacatcgccaaacacttggtccaggttgccggagagaccattgaattgactcctaaagagtttggaatcttatatgagttgatgaaagaaccagaagtagtcaaaaccagagatgagctattgaatgagatttgggggtatgaatacgatggtcaaacaaatgtggtagatgtttatattcgcacccttcgcaacaagctggatgtctgcggtaaagggaaaatgatcgcaactgttcggggattaggctatgtgttgaggaccgcccatgaagaataagttagccaacccacgcagaaaaactgcccagtttcaattaacgagccgcttttctttgattctatttggtctgttgattctcttcaatgtattgtttatcttgttatccgtagggtatttgtttgaacatatcgaaaatcgtgcgagcaatattcttgaggctatcgaaagcggggaagcttcaggggatgactggaatgatctagtcaatgcctatgtttcggcagatgaagaagatgccttgcaagtgatcttagctgatggcagtgtcattttatcagaagatgcagcagagatttttgccgagatcaatcaaggacggatcatcccatttttggagggcatcgtctttacagatgatggtatctattatacgaaaacccaagaaatcgatagggatcaggtgaagatcgccatcaatggtgaggacagtgtggaattagcctatggtctctttatgatcagcagtttcttgaacctgatcgctgtagtcgttggcagtatattgatttattggagcgttgggaaatggagccggaaattaacagggatggcgcaagaaattgctgaaatcgaacaaagccaaaaaggcgaattgacgattgttgaagaaccaatcgagattcgttctgtggcgttggctttcaataaactactgaaagaacagcgtgagacgatcgcgcgagaaaaacggtttgttgccgatgcttctcatgagctgcggacacctttagccgcgattcgcggacatgtccaattgatccagcggcgtggaaccaaacacccagaagtcattccttcttcactggcctttatcgataaagaatcgaagcgtttggaaacattgagtaatcaactgctggatttggaaaaaaaccaaacccaagaaataagtctcgttgatgtctcgcagatcgtgcgagaagaatgtgaaaaacaagcaacgatcgttccgcaatcgattgaatattttgtggaaaaccagtgtaggaagcaagggcacaaacgtgacttccaacagatcatccaaaatcttttagaaaatgcagcgaagtattcaccagcagatcagcccattcatgtgagactgacacaagatcaaacgcacttgtctctaaccgttgccgactttggtattgggatccccaatgataagaaagcgttgatttttgagcgtttctatcgagtggaagattctcgttccagtcaaatttccggttcaggaatcggattatcactggtaaagcagctggccaacaagtatcatgctgaaattaccgtcacggataatcagccgcaaggcagtgtctttaaaattgatttcccaagtgaaagagaaagatgaagatttttttagattttcttcaagcatttttgattcttttttctgaaggacttgttattctaaatatatagaaaaaaggaatagacaattaattggagaaatgaaacatgaaaaaaacaacaattttgttcggaatcgctgccctaggattattggcaggatgtacacaaaataacactggaaattctgaacctgcacaaaacagcagttcaagctcagcagtcgcatcatcaaatgaaacaacttcttcgcaagctgtggacagatcttcaagcagtgcagccatcgcaaatggcggtttgcctacagtgacagtagaagaagccgtccaagtgttccaaaacaaatatccagatgcagcaatcacatcgcttgacttggatacttcttttggtaagtacttctatcaagttgaaggcgtagacgacacgaatgaatttgaactaaagatcgatgcagaaacaaaagaaacttctgaagaaagaaccgaaaaactagatgcggacgaacaaaacggtgtcaaaaaagaagccgatcaattggatctgaccaacttgctttcattggaagagatttccgatagtgctgtgaaagaagctggcggtggacaagcaacagattgggatcttgataaagaaatgaatgtgacttattgggaagtcaaagttgaagacggcaacaaaaaaacaaatgttaaaatcaatgcgcaaacaggagaaattttagaaattgaacaagatgactagcaaaagcgataagcaataaaaaaagcaaggcagcgaataatgaaacttacgccagtaagcgttctttcgctgtcttgctttttattgatttggctttacttctgtgagaggtttgactcttccgcctatttttgctgcaaaggcttccgactgcttccgatcttcaaaaatccacaacttgtcaggtattttttcacgagtgcgacgaccatctttgccaatgtaaccatgcaagactttaacaacatacattgtcatcatcctcccataaaaattacctttgattatacaaaaaagtgctctaaatgcaattaatctgtctcgagattaatttttcgaggcagccgataatgtcgcataatctgaaaatacttgatggatctcaggaaagctgcgcttcaaatggactaggcgataggtctctttactcaaaaaacaatgtttggaagcgccagttgtgactaactgattgttgtcagttctataaatctcataacgaaaatcaagtcgagtaccggtgtaatgatcgacgagcacatcgatgcgtacttgatcctcataacggatcatttccttgtattgtgcattgacttcaagaacgggaacaatcaaacccgcttcttcgattttatggtatggcaattgtaaaaaggcgagcatatctactcgtgcttcttcgaaccaacggatgtaatttgcatggtgaatgattgccatctgatcggtttcatagtaatgaggttggcggatatagccggaatataaggacatcagggttgctccttttcataactgttttcatcagcataatacaaaacaagagaaatgcaaagtgccttctcttgtttcgggactatttaaattcagcaaacaggtgatcaatcgcttgataatcggttgcggataaatggatatccaatgcctgcgcgttgtcagcaacttgactggcttgttttgcacctggaataactgctgcaactgcaggatttttcatgtaccaagccaacacaagttgaggaatcgttgcatcataagaggcagcgattggtcgcaattggtcgacagccgatacgatttttttaaagcgatcaccttgaaagtccggctttttactacggatatcgtcgtttgaaaaggtcgtttcttgtgtgtactttccagtcaacaacccggatgctagtggaaagtacggaataaaattgattgaatgttcagctaaataagggaaaagttctgattcagcttggcgatggatcaaactgtactcatcttccacaacatcaacgtacccttcggcattggcttcttttaattgttcaagtgtgaagttggagacaccgatcgcacggattttgccagcttctttcagttgatgcaatgcgcgaatcgcttcttctttaggggtggtttcatctggaaaatgaatataaaatatatccagatagttggtttttaagcgtgttaaagcttcttcaacggcttgggtcaggaattccggcgaattatcttttttgtttggttcttctggtcgatgagctgctttagtggcaatgatgacttgattgcgatcgaacgcttcttcttgcaagacatcaccgatcagttcttctgatcgaccttcaccgtaaatataggcagtatcaatcaaattgatcccattgcgcagcgccgtccgcacaatttccttgccttcttcttcatctaaatttggaaataaattgtggccgccgatggcatttgcacctaagccaagggagcgtacatagacttgtgatttgccgatttgaacatctgtcataaagcaattcctccttctaatctcttcttttagtgtaaaggaaaaacttgaaaaacgatattcataagtattgaaaaagcctatgaaacagcttgacatttccaaaggattcttgtagtttatagataatatcaaaaatctgtgaaagatcgagtacgtcattattggaccttcaaagagaaaactgccatggctgcaagcagtttaggacaaatgtcggaaagacaatctggagatgaacagaagaaaagctgttccgtgaacgagcgttaatcgaaaggagaatgaaagttctcgaattttaggtggtaccgcgtgtaataactcgcccttgtgtagaaaacaagggcgagttttttgctgtgaatcactgcgattgccctgcgaagcagggcagagcagatgatgaacagtagtaggcgaccggagggagagtagtcaccgcttttcgaatcactgcgattgacctgcgaagcagggcagagcagatgatgaacagtagtaggcgaccggagggagagtagtcaccgctttccgaatcactgcgactggtcgaagactatgcaagtccttcttagcgtaagcttagaagcgacggtaggcgtaacgcagagtagacgagcagatgatgaacagtagtaggcgaccgaagggagagtagtcaccacttttcgaatcactgcgactggtcgaagactatgcaagtccttcttagcgacagcttagaagcgacggtaggcgtaacgcagagtagacgagcagatgatgaacagaaaatcgtttcccacaatggatcaaatcagtatagttgtaatgaatacatacgatcgtttttgatcgatcgaagatacccacaataggaggatgaaaacagatgagttatcaacgtccaaaaggcaccaatgatattttaccaggagaatccgaaaaatggcagtttgttgaagaaacagcccgtttggtttttcgtgattaccagtacaatgaaatccgcacaccgatttttgaacattttgaagtgattgctagaagcgttggtgatacaaccgacatcgtttcaaaagaaatgtacgatttctatgacaaaggagagcgccatgtgacattgcgtccggaaggcacagcgccgattgctcgttcttatgttgaaaataaacttttcggacctgaatacaacaagccttacaaagtcttttatattggaccgatgttccgctatgaacggccgcaaaaaggtcgcttacgtcaattccatcaaatcggtgtagaagcatttggttccgcaaatcctgcgacagatgttgaaacgatggcgatggcgatggatttctttaaacaattagggctaagtcaacttcgattagtgattaactctttaggggataaagaaacgcgtaagaactatcgtcaagcactgattgattatttatcgcctcatgaagcagaattaagtgaagattcaaaacgtcgtctgcatgagaatccactgcgggttttagatagtaaagacaaacgagatcaacagttcgttgcggatgctccttcgatcttggactatttaagtccggaagctaaagcccattttgaaacagtcatcacgatgttggatgctttggacattccttatgagattgattcaaatatggtccggggactggattattatacccatactatttttgagattatgagtgaagcgccaaaaatgggggcgcaagctacgatctgtgcgggtggacgctatgaccatctggtcgaagaattaggcggcccacaaacgccaggtttcggttttgcgatgggcttagaacgtctattgatcacaatggaagcagaagaagtcgttattccagcattgaacgaattagatgcttatgttgttggtctaggagaagcaaccaatttggaagcattgaaagtcgttcaggcgatccgtaattttggcttttcggcagatcgtgattttatgaatcggaaagcaaaagcgcagttcaaatcggcagataagcaaggggcgcgtttggtgctgaccctaggtgaaaatgaattagctgaacaagtgatcaacatcaaatcgatggcaagccggatcgagaaacaatttaagttagccgatctgtatgatcattttgatgaaatctatgatgaaatgactacaatcttaatcaagcaaggagaagaagaatgagcaaacgtacagtatattgtgggcgcgtctcagaagcccatttagatcaaaccgttactttaaaaggctgggtccaaaaacgtcgtgacttaggcggagtgattttcattgatttgcgggacagagaagggatcgtgcaagttgtctttaatccggaagtatccaaagaagcatgggcgattgcagatacttgccgcagcgagtatgtgctagaagtgacaggtcaagtcatcaatcgagcaccggaagcaatcaatcctaagatgaaaaccgggcactatgaagtgatggtcagcgagatcactattttgaatacagccaaaacacctgcattttcgatcgaagatgatcaaatcgtaggagacgaaacgcggttgaaatatcgttatttggatttacgccgtcccaaaatgactaagaatatcatgatgcgggcaaaaacgacacaagtgattcgtcatttcttggataccaatgactttctagatatcgaaaccccttatttagcgaaatcaacaccagaaggcgccagagattatctcgttccttcccgggtttaccctggtcatttttatgcattgccacaatcgccacaaattttcaaacaattattgatgggtgctggattcgatcgttactatcaaatcgtccgttgcttccgggatgaagacttgcggggagaccgtcagcctgaatttacccaagtcgatattgaaacaacctttttgacggcggaagagattcaagcttacacggaggaactgttagtcaatgtcatgcgtgaagtcaaagggctagaagtaactacgccgtttctgcgaatgacttacgatgatgccatggcacgttatggcagcgacaagccagatactcggtttgacatggaattgattgatttgtccgaaaccgttaaagatgttgatttcaaagttttccaaatggcgcttgaaaatggcggtgtggtgaaagcattgaatgcgaaaggtgctgcggataaatattcccgaaaagatatggataatttgggacattacgcaggacagtttggtgcgaaagggttagcatgggtcaaagtagaagaagatggcttaaaaggaccaatcgcaaaattcttgactgacgctgcagcatcgatcattgctgctacgaatgcagaagtgggcgatatcctaatgtttggtgcggataagtttgagatcgtttcggcggctttaggagcaatccgcagcaagttaggaaaagaattaggcttgatcgatgaaagcaagttcaatttcttatgggtaacagattggccacaatttgaatacgatgcagaagctggccgctatgtctctgctcaccatccatttacgatgcctaaagaaaaagatgtaccattgttggcaactgatcctgcaaaagtgtatgcggaagcttatgatatcgtcttgaacggttacgagcttggcggtgggtctctccggatccatcagcgggatgttcaagaacaaatgtttgaaacccttggtttttctcgccgtgaaatggaagaacaatttggtttcttgctgacggcattagactatgggttcccaccacatggcggaatcgcactaggcttggatcgtttagtgatgttgctggctggtgaagaaaacatccgtgaagtgatcgcattccctaaaaacgggaaagccgccgatccaatgtcacaagcgccaagtaaagtggcgccgctgcaattgttcgaattgaatattgatgtcacgacagttgaagaagactaagtaaaaagaaatgaacaagtaaagaacaaacgagcgaatgatgaatgaaaatagacgattaagaaaattccatgagaatttgtctatttctttcattgttcgtttctttttttactatctgaagtataataagagcaaatcaacaaagcgaggctcttgaatgaaatgaataccctctttaaatggctgccacaccctgattatgccaacaaattatcgttttcgatcgtctacgccattttatcggcgatcgcagtcaattttttttatcaacccggcaaaatctattctagcgggatcacagggatagctcaaattttgaccaccgtttccacggattggcttggattctatatccccgtctcagtcgccctattgttgctgaatattccgcttttctttctcggctggttcaagattggtcataaatttacgattttcacaggaattactgtagtcctaacatctttgttcgtacagattcttccagaagaaacactgacgacagatccgatgatctgtgggatttttgggggagccatcaacggagccggtattggttatgcgctaaaaagcggactttcctctggcggcctcgattttgtaagtatcgcgatccggaaacgtacggggaaaaccatcgggtccatctcgatttttttcaatattgccatcatgtttgctgcgggcatcctgttcggctggcagtatgcgctatatagtgccattgcgatttttgtcagtggtaaagtcaccgatgctgtttttaccaagcaaaagaaaatgcaggtaacgattattacgagaattcctgaagaagtcatccatacgatccagaaaagtctgcgccgaggaattacgatcatcaatgaagcagaaggagcctacaagcatgataaacagacagtattattgactgtcgttacacgcttcgagttgccgatgttacgttctgccatgaaagaagcagatcccaaggcatttgtcagtattgctgaaaatgtacaaatattgggtcgtttttatgaagaagaattataggagagcttggatcaaagcgtttcgtgatgaaatgcttttttctttttgtaaaaattaatttttttagaaaatagagtattcttgctagctttcttgttgctttatctggtaaattatgaagaaatgggtcattattttttaatggttccacattgactgtttcttacgaaaacagttgatcaaaaaaaagaaaagtggttggagaatgaacaaacggttaaaaacaagccgctatatcactggtttcgacggtatccgtacattagccgtgatcggcgttatcttatatcatttattacctactcaaatgcgaggcgggtatttaggagttcctgttttttttgtagtttctggttatttgatcaccgatttgcttcgacaggagtgggaccagaacggtcgtattgctgtcaaagatttttatgtccgccggatgaaacgactgtatcctggcatggtggtgatgctgcttctgtctgctgcctatattacattgttccagcggaatttactgaataatctgcggggagtcgtcgtcagcagtctcttgtatgtcaacaactggtggcagatcaatcacggtctttcttattttgaccgattcggcaatgaatctccctttacgcatctatggtctttggctgttgaaggacagaattatttgatttggccgttactctttattttattgatgaagttagtcaaaaatcgtgggacgatttttaaaatcgtgatcggctgctcgttactttcggctcttttattagcgatctggtattcaccaggggcagaccctactcgagtttattatggtaccgacacgcgtttgttttcgatttggatgggaagtgcgctggctttcatttggcccagcacccatttaaaaaaagaaattccgaagaaagcgaagcgggtattgaacctagctggtggtctttcttttattggtttagtgataacattttttgtgctagatgatcatctttcctttgtttattacggaggaatgctgctagtcagcttgctttgtacgatcttggtggcggtcactgcccatcctggagctagtctgaaccgttggctgacaaatccgttattcagttacatcggcaagcggagttatgggatttatttgtatcagttccctgtgatgattttttatgaagcaaagattgggaatgtcggcgaaaatgttctcctgcatacattgattgagattgtattgattctcttgatcagtgaattgtcctatcggtttatcgaaaatccgttgcggaaattccactacaaagatactttccgcacggtgcgcaattggtttagtaaaccagtgatcagtcgacaaaaaccttggctgcttccaggactgcttgtttccttagttgctctttatggaatagctaccgctccggtgaattatgtagatgcgcaacagcagcagttaaaagaaaatattgctgccaataaaaaagcggcagaacagacacaaaaaaatgcgaatggctcggatacagaaagtacaggagacaattcttcaaaggcaacggaagccgaacaatcagtaatggaaaaatatgggttgacagaagcccaggtgaagaaggctgaagagctggaaattaccgcttttggtgattctgttatgctggatgccactgccgacttgcaagaaatttttcccaaagctgtcgttgatggggatgtgggacgacaattgtatgagagtccggaactgatcaaagcgttgaaagaaaaagatttgttacgagatacggtattgatcggtctaggaacgaatgggtcctttacagaaacccaattcgataatttgatgaaagaaattggcgatcgcaaagtctattggatcaatgtgcgggtacctacgcaaagatggcaaaatgaggtcaacagcatgctggagaaaatggctgctaaatacgacaatatgacattgatcgattggtatgatttaagtaatgaacatgaagagtggttctatgaagatcgagttcatccaaatcctgatggtatgttgcaatattgtacactagtttctcaagctattttgcaataatggcgttgactatttcttagaaaaataaactaaccgagaggtctcaagcacagattcttgtttatcttcaagaatcgcaagagatctctcggttttttgtatcgcctttcctaagtggaatgaggatctttatccaatcgttgcaacaagcgtttcaaacaacaatgcactggaagcggcacctggatcgatatgtccgattgcccgctcgcctaaataagaagcacggccttttttagcgactaggtcttttgtatgttctttggcttcctcgatttgttctttagtcagactgccgttttttaacgctgcggcaacaggttgccagacatcgaccatcgttttgtcttcgaattctgctttgcctcgagctttgatcccattaagcccttcttcgatgatgcttcctaattgttcatacgaatcaattgtttctagttcttttgtagctttggtcatgttcatgaatgctgagccataaagtggacctgaagcaccaccaactttagagatcaatgccatcgagagtactttgaatgtgtctgtgattgttttaggctgttgttttgcgaatgcttcttgataggctgcgacgccgcgagccatattgttgccgtgatcgccgtcaccaataggggtatctagatcacttaaatagcctttattttcctcaatggcttttgtaaatgcatttaaccattgttgggtcatctctgttgtcatttgcattgaaaattcctcctttaccaagcaatcgtttcaacaggttcgttgagcgcatccgtcgcatcgttgttactgaaatcgatcatggtcaatgatagaccttgcatatcgatagaggtcatatagttgccgactttatggaatgtgacagaaatgtctttgtctgcgagcaatttctgtacatcgttggcaaagacgaattgttccatcagcggtgtaccacccatgccgttgatcaagacaccaacttttttcggtgtttgttcataatcagctaaaattttgtccaccaattccttggctagctctttcgatggtttcaatttttcccggcgataaccaggttctccatggattcccacgccatactcgatttcatcatctgctaattcaaaaccaggtttacccacttctggaacggttgctgcttttaaggcaacaccaatggttttgatggtcggaactaatgcttcacctaattcttttaattcagttaatgaacgtccttgacgagcaaaagcacccaaaatcttatgaacgagaatggttccagccacgcctcgttttccagcagtataggtactgttctcgacggcaatatcatcatctacgacgacgatttcagcagtgatgtcttccatctcagccatatctttggccatttcaaagtttaggatatctcccgtatagtttttaacgatcaaaagcacgccttgcccttgatcggcttctttgatcccagtcaggatctgatctggtgttggagaagtgaagacgtctcccaagacggcggcactcaacataccatcaccaacaaacccagcgtgtgccggttcgtgtccgctgcctccgcctgagactaagccaacttgttcgtgggtggtgttttttgctacgactcgggagtcttcgacttgatgaaccagttgcggatagctggcaaccagaccagctagcatttcttcgacgatcgctgaaggatcattgattatttttttcattattgtttccatcctttctcagctgctttttgggcttctgctgtgatctgggataggtcatcactgaatccagcggtgattgctgcggcaaaagcaccttctacaagcggtgcatcaatcaagtgatagcgggtttgctgttccggttccaacatatcataggctagctctgcgtttagtacggcactacccaaatcagcaaaaacgagaatctgttcggcatccggagactgattgaccgcttcaacgatttttgtcggatcagaccctaattcgccttcagctgttccacccaatgaaaaaagagtgactgtttcgctgtccgacatgtcttcgatcatggctttcagtccgtctgtcagttgttgactgtgagaaacaagtaaaatacttttcttcatttcgattcaccaacgctttcttaaatagattcagcggcagtagacgaaaccgccttcactaaaagtataacaaatttcgcaaaacttgcatggatgacgattgagagggggcaaaacaaacaacaagctaaatttgtttttaacgatcaacaacaactcgtgaaagaggaattgagcaacggtaagaagatcaatcgattaaatagttgtttataaatagaaaattactcctatgcatcttttctttttgcctaaattttatagggatttaaaaaaagtacttgcatttgagtttgttaccgattacaatccaagtgtaatcattattttgttattcaatgtacaaaaaaatgtatattgggaatggaggatttctatgaaaaaaattgttattggcggtcagattgataaaaatgaagtgaaggacttggtagaaaaatttagtgaggggcaatttgaaattgacattaaaagtgacttagatgcggctatggcagtaaagtctgggcaggcagattattatgtaggtgcttgtaatactggtggaggcggggcattagcaatggctttagcactattaggaagagaaaattgtgtaactgtttcaatgccgggaaatgtaatgcctgaagcagaaatccgtgagaatgtacaatcaggtaaaactgcctttggctttacagctcagcataaagaaacggttataccgatcatcatggatgagttgaaaaaaactataatctagcggaggaaagaagatggattcatcaaaaattattgagttagttgcaatcgcgttgttaggtggaatatgtgcagtgttggcaaataaaggtatcgcagtatttaacgatggattacgaccaattgttcctgaatttttagaaggaaagattgggaaaaaagaaattgctgctacgagctttgcattgagttttggtctagttattggttttggtattccagtatccatcggggcatctattttactggttcatagtgttttattaatgacggatatcatcggatcctgggcgccagaaggcaagtctggtatcatcatttcggcaattataggcgctatgtatggaattggtcttgttctaggattgcaggcggtagttgatttatttgcaatgatgcccgtgaatttcatggattctttgtctatggtagggacaccagttgttatttcttttagcatttttccagctgtcgcaattgctagtcagcatggatttaaaaaaggagctatttcttttgcagccacattattaactttatttgcagtgaagcgctttggtacgtttgatttaggtaatggaacttccttaacactgagtgcggagggaatgtcattactggttggtatgattttcatgattgtgtacgccattcaggtcaaaagtgatggaagcaactcaaatgaaagtcttgtcagtgtttttttagaacgtgttaaccgtattaaaaaaaattgggcatggttagcagtgaccggtggcttagtctcagcagcaactagtttaatgattattgccggagatccaatttctttaaatttactttcggaaggaaaatttagtgaggctggattagctgccttcgctcgaggcattggatttattccgttggtgttttcaactgcaatcgtaacgggagtttatagtccagctggtacgacctttgtatttgtagctggtattttattgcatgataatccaataatggcttttatcgtaggttcagctttaatgtttattgaagtacaattgttgagtttgatggcaaaagccctggataagtttccgggtattcgtgaaatgggtgagcatattcgaacggcaatgaataaggttttagaagtagcactactgattgggggcgctatggcatctgaacaaattgcgccgggaatcggttatttctgggtcattggtttaatgttattgaatagaaaagcgaagaaaccagtggttgaattggctgttggtccaattgcggcaattagtttaggtgtaattgtaaacatcctttatctggttggattatttgcaccagttgtagcgaactaggaggtagctgtacatgattcttgaaggtatcacatatatgcatgaacacacaacgattgatttatctcgattaaaaaagagtgatgatacaaatttaaattgctttgatgaaactgtttcagaatacaaaaatttgtacgataaaggtgttcgaaatatcgttgatgtaacgaatcttgatatgcgaagaaatcctttatatgttcaaaaagtggctgaacaaactggaataaatattattcaggcaacaggtttttatcaggataaatttttacctagctttgtgacagaagcatcgattgatcaattgtcctcattaatgatcaaagaaatcgaagaaggaattgcggaaacaacgatcaaagcagggattataggggaaatcggtacgagcaaggacaggatgacagatcgagaacgaaaaatatttaccgctgctgtcattgcccaacaacagactaagatcccgattacgacacatacaacattaggcacatacgggcatgagcaggtagcttttttcaaggaacaacaggcggatttgtcaaaaatagttatcggccatgttgatctaagtggcagcacagactatattctaaaaatgctagacgaaggtgtttatgttgaatttgatacgatcggaaaagaaaactatcagccagatttattaagaattgaaatgctgaaagaaatagagaaacgtggctatcaagataaagtcttcctttcaatggatatcacgcgtaaatcaaatctgtcttatcaaggtggtatagggtattcttatcttttggatacctttgttccgatggctttagaaaatggtgtttctcagacatttattgaccgaatgctacgaataaatcccaaaaaatttatggatgattaggagatattgatcatgaaagcttatcctttaaccagtctaacggtgacagaagcacaacaattacaatttaagcttgttgatgccattacacgaattgtacctggggatgaactattaacaagaggggatcttggtgtagtaaaaggactaaatcaaccaaaaactacctaccagattgagcaagtattggctaatttttttgaatcagaacaagctatgctcgttcgcggatctggtacaaatgctattcgactagccctccatgctgcagtaggaactggtaaaacgttgttagtgcatgatgcccccatttatcctactacgaaagtttcaattgagatgttgggaatccagacaattcatgctgactttaatgatcagacgagtgtgacacaggccttaaatgaaaggcaagttgatggagttctaatccaagtcacgaggcaaaaaatttcagattcatatgacttagcacaactgattgccactattcgtagggtgaatccactaattccaattattacagatgataattatgcggctttaaagacaaaagctataggttctcaattaggtggcaccttagcctgtttttcaacatttaaattgcttggtccggaaggtattggatgcattgttggtgagaaagaatacattagtaaattacgagaagaaaattattctggtggtggacaggtacaagggcatgaggcattggatgtagttaaaggaatgatttatgcaccagtagctttagcaatctccgctgaggtaagtgaagcagtttgtagaagaatcaacgaaggcgaaatcgcagaatttaaaaaagcctatattgtcaatgcgcaatctaaagttgttgtagtaaaattaaaggaaccaatagcacaggcgattattacagaagcaaccaagttaggggctttgcctcatccagtcggtgcagagtcacaatacgagtttgcacctttagtttatcgcgtttcgggtaccttcaagcaatctgatccagaagctgagacaacaatgatccgaataaacccgaatcgatctggcacggataccattatgcgtatcttgcaagcatctgtaaaacgagcctcaagataaggagaaatcatgggggaagagtttttaaagaaaaaaggaattgtcattaactttctagcatccgatcttttacaattaaaaaaaggggatcgtgtacctagtgttagcgaatatcagactcgcttcgatgttgcgagagggacgatccaaaatgcgctaacctttctaaaagagataaaggcagttcaattaaaaagtcatgggcatttaggaacctttattgaagccattgattatggagtattacaagaatacgctttatcggatacgattttaggaacaatgacgttaccctattcacgattgtatgaagggctagcaacaggaatttacgaagtctttaaagagaataatatcaaacttaatatggcatacattcgaggttccaaagaaagaatccgctcaattacaaataaaacgtatcgttttgcagttgtttcagcatttgctgctcaacgagcaattaaacaaggagagcctttagaaatagttgttaattttgggacacagacatatttaagcgagcacgtcttgttgtttaaagaagagggacaaactgttcttacatcaggtatgagaattgccatcgactacagctcattagatcaacaggcactaacaaaggaaataattggtgacttacctgtagaatttattgagatgcaaggacatcaaatcatctctgcgcttaaggatgatcacattgatgctgggatatggaactttgatgaaattagggataaaaatcagcaagggttacagtatgtgtccttaaaagaaaatcagttagaaaaagcgatggggacttcggtaatcattacgcatattgaagatgtttcaatgaaagccttcctacaaaaaagcatcaataaagagaaagtactgcaaattcaacaagcagtttgccaaggacaattaattccgcaatattagtaagggggcttattcatgataagagataaattaactgttttattagattcggggattgttgatcaggaaacgtacgattatgtatttaacgttttatcctatttattagaaaaagaaattgttgaagaagagcaacaagctgatgtttttttgacccacttagcgatggcagatatgcgaagaaaaaataatgaaactgtcaacagcttagagtctttcatccaagcagagattgaaggtgatccgcattatcttcattctagagaattgtggcaagacttacaaaaaatgacaagtgaacagtcattcgcggatgcggagttagattatttttatctgcatatcattaatatgttaagggaggagtaatatgttcttagatgtaacgatgcgcaaaaatccgcagttagtagaagccggattaagattgcatcaaacaggacaaattcttccagatacgtatgtgctagatcttgatgctatcgaaaacaatactcggcttttagtggaaagcgctacaaaaaatcaaatcgaactgttctttatgacaaaacagtttgggcgaaacccttatgtcgcacagaaaattcatgaggcaggtattaaaaaagttgtggtggtggattacaaggaagctttagtgatgatgaaacaaggcttgcctttagggaatgtcggtcatcttgtgcaaattcccaaacacttgctaaagaaaattatggattatggtacagactatatcactgttttttcaactgaaatgatcaataatatcgcgactgttgccagggagttaggaatccagcaaaaaatactactcaaagtgattgaaccaggcgacgaaatttatgagggacaatttggaggatttcatctaaatgaattaacgaaggtcattgaaatagtaaaacaggaaggaattatcgttggggggattacttcctttccttgttttctttttgatggcgtttctgagttacaaccaacgcacaatgttgaaacaattaagaaagcaataaccattcttaaacaggctggtttcgcaataaaagaagtaaatatgccttctgctacttgtagtcgaacaattccttttatccatgagttaggagggacacaaggggaaccggggcatgctttaacagggacgacccccttacatgctcaactagaattgccagaaaaaccagcaatattgtatgtcagcgagatttctcataacttagatggtcacggttatttttatgggggcggttattatcggcgagggcatttagaaagcgtaatgatttctactgacgaccagaagctagcaaaagatgaagttataccttttggtaatgatagtattgattattatctttcaactaaactcccacatgaagttggtgcaacagtacttgcggcatttcgcactcaaatatttgttactagaagtgatgttgctgtagtgtcagggattcaaactggacaacctagaattgaaggaatatatgacagtcttggaaaacaaattagaaggtgagaatatggggagatttgtcgttattgtattagatagttttggtgttggtgctatgaatgatgtacaggaggtacggccacgtgatattggcagtacgacagctggacatattattcgagacataccgaatattcaaataccaaccttggaaaaattaggcttaatgaatgctttaggggaggaaattggacgtcatcatttttctaaaacagcaaattatggaacgagtaatttggctcactatggtgcggattcttttttaggacatcaggaaattatgggaacgacaccaaaaatccctttgattcagccattcaaccaaaagattgatgtagtggaagagaatttagtgaaacaagggtatcaagtgcggcgagttggtgagaaagggactcaaatcttagtggtcaacgaggtggcaacagtcggcgataacttggaaactgattatggacaagtctataatgtatcggcttgtctggatttagttgattttactaacttaaaaaaaataggacaagcggttagagacgttgttcaagtctctcgtgtgatcacttttggtggagaacagattgttttagatgacttattatcagccaaaaaagtgaaaaatgatgagattgctggagtggatgctcctgaatcaggtgtttacaatcatggctatcaagtcgttcacttggggtatgggattgacaaaaatgtccaaacaccgaccatcttggataaagcaggaatcacggtatctttcctaggaaaaattgctgatattattcaaacggaaagtcatcgactatttcccggggttgattctgaaggattgtttgataatttgatgagtgaagtaaaaacaattgatcacggatttattgctttgaatattcaagaaaccgatttagcggggcatgcggaggatactgagaagtatgcagatcgtttggaagtaagtgatcgtagaattggcgaattgttacttgagatgcgagaaggagatctattgattgtgatggctgatcatggcaatgacccaacgattggacacagcaatcatactcgtgagcgcgtcccgctattaatttatagcccgggggtgcaagggaaaaaaattggtgagcggctgaccttagcggatgtaggagcaacggttgctgactattttaaggtggcagcaccacaaaatggtgactcctttttaaaagaaatttttgattgataaaaaagacttgggtgcttgttttcataaaaagctatgccaagtcttttttaggaaggaggtataaggatgcatgaaagggtacaaaagtatgcgctaaaaactagtttgggcatgttaaatccaagtggttcagtagtaactgtttatcccaatgcgatcaagcagatcaatacactcaatgactattatctaggagtgaagcaagtatcatttatgttgactgactttttaacgtttttatcaagcaacggatttcatcaacacacattagacaaagcaagttttagcggcagagggattgatcttgatttgaagaaccccattactggtcgctttatgtcaggatcatctagtggcacagcattgaatgtttttctaggaatcaacgatgttggattgggcactgatgggggcggatccgttctagctcctgcgtctgccttaaatttggtaggatttatccatcctgatcttggaaatcaatttgttgatctatctgtaaatagaaaaacatcaacggataatatttcatttacaccctcgctagggtttattagtaaaaagctctcactgattgaacagctttgtcacctttgcttaccccaaatgtttaagcagacacctaaaagaagggtagtggtcgataatagaattgacgtgaagatgcgccaagaactttctaatatttctaccatcgaatgcatgtacaaaacctttgaagatgcaacgaccttttctcgagaaacattgattcaacagttacaggcaatgctcattgatttcgatgtgattgttgtcaaagaaggacccattgacttgtttggcatcggggatactgttttcggtcattttgatgaacggacaatgggaatacaacagcaagcaggaaaagggtatattcgggttgtgaatatgtgtcaagcagtagggttagttgttccaagcagtgaattagcgactagctatctattgatttgtaaaaaagagaataatcttgagcctctatttaccttagccaaagcactcctatgcaaaatggatcccttgattgagacctattttgctgatagtcaaaagtattttgaacatggatatcaaagttgaagaactgaaattgctagtcgccttttctactaaggaaagacagaaagttaataaagattttatgagcggaaacaacaaaaatccgaacaaccgttgataagtatcttaatcaggagaagggatcatcgttgttcggatttattttattgaaaggatcaagccgtagcgttttgctctagccggcgggtgatctgtgttgcaagggcagatagcccccactgcaataagcagttgatcgccatcaatccaacaaagattggcaaggtgatgctagtcaaaaagcctacttctaaaatgtgatggaagagcattgcggcgatgtatgttccgctaatcgtggttacgatcaaaaataagcgcaatggatttagcggcaaacagctgcggatcacagctaaacaactgatgccgatcagcagataatagaacaatgtagttgcggtcattggttcccagccatagtcagtttgcaggaactgtacagcgaaataattcagaagcaccaagagtgcgctcggcaacgctcgcagcaatgcggtaggcaagtaacggccggtgattcgctttttgtcttcttcaaaggaaaggaagaaggaaggatatccttcaattgctaggtccaataatgtgatttggatcggaataaaaggaaatgccgtagaagtggcaacacatagtaaggacaataggaaactgtagatcgttttgataaaaaagatcccagatactttcgtcacattattaacgacacggcgaccttcaaagagtgctgctggcagtgtcgtaaaatcggaatctaataaaaccagattcgcgattttacgagccgcactgtccccagcagccatagcgatactgacatcggcttcacgcagtgccaacacgtcattgacgccgtctccagtcatggcgaccgtattgcctagtgccttcaactcagaaactagcagtttcttttgctgaggcgtcactcgcccaaaaacggtataggtttgggcagcttgacgaacgtctgcttcttcagttagttgggaaagatcgatatagttctctgaattaggcaatccggcgcgtttggcgatggctgcaacagtgatcggattgtcacccgagatcactttcaagtccactccttctgcagacaggtaggccaatgtgctttctgcattttcccgaatcacatcagcaagaacaagaactgccagcggggcagcctttgctggatcaaagggctgattggcgtcgttataatgaggatcaagagtcaagacgaggactcttaaaccagccgattgcgcttcttgaatttgcggcagctgttggttggcgatcgtcttttcaggtgctcctagatagactgcccctaattcgtgaaatgcgatagcaccccattttcgatcagaagaaaacggcatcgctgcaaaggactggtaatgatcagatccggtgatggtttggcgcaacgcttgcatcgtcacattgttgtcggtactggcagccaaataactacctaagattgccgttatatcttgggtgtcatcgattggctggatcgattcgacggataatcgaccttccgttaatgtgccggttttgtctaaacagagggtatcgacatgggccagtgtctcgatcgcgtacatatcttggactaagatcctttttttggctagtttgatgacacccgtggtcaaagcaatgctgatcaataggacgagtcctttaggcagcattcccaataaagcagcagacgaaacgatcactgcttcttttaagtcactaccacgaaataaataagcttgtagaaataggatcacccctaatggaacaatcactagactggtgaattttgtgactttgcgaatcgaagaaactagctctgaacgcagcggtttatgtgttttggcttcattgcttaattttgccgcataattctctgctcctacgcggatcacttttgcagtgacctctccactggcgacaaaactgccagataagagagtcgcgtcgttttctttgacgacgagatcggcttcgcctgtcagcatcgactcattgacatcggcttgtccagataaaaccaccatgtcggctggaatctgttctcctgcaccaatgacaacaagatcatcaaggaccagggatttggcatccaccgactgtgtaacgccatctcgtatcacacgtatttcttgttgggcgatgatcgagagttttttgactagatttcgagcatggatctcttgactgatccctacagtgatattgatcaaaatgattaccagataaaataaattggaataggcgccaactgccagaagacagacaccaatcaacaagttcagcaaattgaacaatgtgaggatattgtccttaaaaattgctgtcgtagacttcgatgtttttgtttcataatcgttgtgttggtcttgttcggttcgttgtgtgacttcttctgaggtaagtcccgtatctatttgcttcatataattctccatttctatcagattccttgtttagtctagcatgccaagaagtcattgcaagaaatgatgaaaaaataattgaaatcttaaaaaacagtagcggtttgttcgaaagaaggggcttttcattgacttgttcccagaaacttgatatagtcataatgctcaaatagtaatgatttcgatttgttgtttttgaatcgaaaatggaggactctgctagctgatttcttttctttttagaatgatggatagaaaaaacaaaggagaaaataatggccaaaaaatcaaaacaagcaaaagcaaaaaaacaagcctcaatgatcgagcaatacgcagagatccgttaccaattgaaacaagcaaaagattaccaagctttagcaaaattgcctaaagattctaatccgaatcgcttgaagaatcgggatatgactgatggtcgtccacggggctatatgcgtaaatttggtctttcacggatcacttttcgacaattggcacatgaaggcaaattgccaggtgtaaaaaaagctagttggtaaacatttaataggtgtaacaaaaataatacaatcaaacgatctcccttctagatagctcagaaatgcgctgtatggaggggtattcaaggaaaactatctgaatgctgaggcagctgatctcctaaaaagactgggagatagacgccgagcgtttaggtagttttttgtttgaattttttgagggcagcgattcgactaatcggaagtggtctcgtataatagaaaaagcaaagacgaaggtctgatgaacacatgttggataggagtatatcatgtctttaaaagagaaaatcatcgcagaaagcaagcgtttaggtattgataaaatcggctttgcttctgctgaaccgttttatgaattagagtcctcgttgagggagcagcgcgcgaaaggccatacatctggtttcgaacatcaagtgatcgaagagcggatatatccagaaagaacctttgaaaatccgcaaacaatcattgcgatcgctctggcatatccgacaaaaatcaaagagaaagtgccgcgagatgagaaacgggggatgtttgcccgcgcctcttgggggatcgattaccatgatattttacgtgatcgcttagaaaaattgatccagtttatcaaagcgcaagcagagaatctggaagaagcagaaagctggcggtttgccccgcaagtggataccggtgagctggtggatgtggcagttgcacagcgtgctggtttggggtttattggccgcaatggcttattgatcacggaagaatttggttcttttgtttatttaggcgagatcgtcaccaatatttccttcgaaacagatgaagcggtaccctttggctgtggggattgtatgcgctgtgttactgcctgtcctacaaaagcgctcttaggggatgggcgaatgaacgcacagtgctgcctttcctatcagacacaaacaaaaggcatgatgcctgaggaatatcgtaaaaagatgcataatgtcatctatggctgtgatatttgtcagttggtctgtccctacaatcgaggcaaggatttccattttcatcaggaaatggaaccggaagtagaaaccgtttatcctaagttgcagccaatgctttctttatcaaataaagcttttaagaatcagtttgggcatttatctggttcttggcgcgggaagaaaccattgcagcgtaatgcgatcattgccttagcaaatctgggagatcgcaccgcattgccagccatctggcggtgtgcgacagaagacgtccgacctgtcatccgtggaacagcctattgggccattggacaattaggcatcaaagaacccgaacaatggctagaacgcttacagcaatgcgaagaactagaaccagaagaagaagcacgcgttgaactacaagcggcgatcgaacgcttaaaaacgatcgtggcatcctccggtgcagatcggaaaaacaagtcagttgattgattgcgtgctaggcggaactccataagcacgtgagcaatcgtacaaaaaattaaagcacgcgattttttataataaagagccgagcaatgtttagaatacgtcaactatgccgcaaatgcgacatgacctgaaaagtctggaagtattccgacattgctcggctattggtcgaatggatgctatttttaggggaagatttttcacagtagtctattttttcagcttaatccagcacatcatcgctttcaacgatttcttctgagtctaattcaaagtctggtgctggatggacacgttccggtaattccatctctagttcagctgtttgttggtattcgttgtcgctatcagcaacgtcaatcaatatatccgttggcagttcttgatcgattcgatagccttgtgcatggcgcgcatcgagtagttctaagaggtgctgccattcatctttggcaatcaccacgacatcgattccttcttgattttgaatttcgacaacagaagatagatcagtcccaacagtctgaatgatttcttctaatgaccattttacgttttctaatgaaattttttgtgccatttggatacccctttcttgtcaattgactctcatttcattgtagcgggaatttggttgattgcaaaatagtatgatcgcaggtctatgaaaggggttaaaaaaatgagaagaagaattgaagtcttttgtgaacaaaggtaatatggtattaaaagaaatgagggagtaaagatgaaagaaaaacaaacgtttcatgttaacggttacttagcactgatcgtcttgatcgccttaatgatcggcggcggctatctcttttatgatgggattgtccgcaatgcggtttgggagttagtcatcagtgtcgtgttgtggatcatcgctatcttgttcattagttcattgacgattgtgcagccgaatcaagcgaaagcgattcttttctttggtcaatatttaggtaccattaaagacaatggactctttgtgactgtgccgctaacacagaaaatcaatgtatcactgaaagtccgtaacttcaatagctctttattgaaggtcaatgattctgatggcaatccgatcgaaatctcagcagtcgtcgtctttcgagtcgtagatacggccaaagcattgttcgatgtcgattactaccaagattttgttgagatccaaagtgaaacagcgattcgccatatcgctacccagtatccttatgacacttttaatgatgatgatttgactttgcgaggcaataccaatgaagtttctgaagaactggcacaagaactgcaagagcgtttagcggtagccggtgtcgaggtgatcgagacgcggttgaatcacttggcgtatgccactgagatcgctagtgccatgttgcagcgtcagcaagccaaagcaattttatcggcacgacaaatcattgttgaaggagcggtctccatgacacaaatggccttggaacagatcgaagatggccaggatattaactttactgacgatcgaaaagtccaattgatcaacaatttactcgtatcgatcattactgacaaaggcactcaacctgtgatcaatacaggcgatgtgaaagaaaaggcggtgtaatcaaatgaaaaaactttacatcaagcaaaaagtcttcagtatcggtgaaaaatttactgtcatggatgagcagcaaaagccgcgctattttgtcgaagggagtttcatgaagattcctaaaagctttgcgatttatgatgaacgacaacagcaaatcggtgaagtcacaaagaaagtgtttagtctattgcccaagttttttgttgaggtacatggagaagaagcaattgttctagaaaaagaattcacgcttttcaaagcgcgttattccatccatgcccaaggaattgaaattcaggggaattggtgggacatggactttgtcgtcaatcgacagggacgtcaaattgctgagattcataaacgatggatctcatggggggatacctatgaagtaacggtttatgaggaagatctggaggacttgattatttgtctcgtcattgccatcgatcgcgtaaaagccgatgatggtgcagctgcgagttctgccagtacttaaacagaaaatgaaagcaacgatggaaaaggagacgaaaagatgtacggatcgatagaagcaggcggtacaaaatttgtttgtgcgattggtgatgaagaaatgaccattaaagaacgggtcagttttcccaccaccacaccagaagaaacaatggcattagtgatcgattttttcaaaaagtatgaagaccagttagtggggatcggtattggttcctttggcccaatcgatatccatcgagattccgcaacgtatggctacattacctccacacccaaattagcttggcagaattttgattttgtaggtacgatgaaacaagcctttcccatccccattgcttggaccacagatgtcaatgctgcagcttatggggaatatgttttcggtaaaggaaaaggactatccagtgtagtttattatacgatcggcaccggtgttggcggcggtgcattacaagatggccgctttgttgagggattcagccatccggagatgggacatatgctggtagtgcctcatcctgatgattcattcgaaggcagctgtccatttcatggcaactgtctcgaagggatggccgcaggtccagcgattgaaaaacgcttaggaaagaaaggacaggaactgtctgaagatgagcctttctggagcatcgaagctgaatatatcgcgcaatgcgcctacaacactacattgatgctttcaccggatgtcattatttttggtggtggcgtaatgaagcagcgtcacatggtggaaaaggttcatcaagcttttgaacgattggtcaacggctatgtcaaaacaccagcagttgcagactacatcgtgacacctgaattagaagacaatgcaggaacattaggctgtctggcactagcacgagaagctgtgttacattcctgatacatgtgatcacaccaaaacattggtgtgatttttttgtgattgaagggattatttggcaggtaagagcagaatgcgtatacttaagcagaggtggaaagagatgaaaattgcagttcgtaaaagaaaaatcgggaatatcccagtattggaagtcgttccagaacatttgatctatgaaccgttgccgttgatcatttattatcatggttggcaaacgagtaaagaattggtactgacgcaaggtcgaaaactagcacgggaaaactttcgtgtgattttacctgatgccgccaatcatggcgaacgaaagacccaactatccgagattccttcattgattttctggcaaagcattcataccaacttatttgagttttcttatttggtggatttctttgaaaatctaggcttggtaaataggcaaatcgctgtaggaggcgtttcaatgggagggatgacgacttgcggcttgctatgtcaacacccggagatcaccgctgctgcgtgtgtgatgggctcgccatcgatgatcggttaccgtgaacggatccagaaacatgcgggtgctgcaggtttctttgtcccagatgactatcagttgctactgggatggatcgaagcttatgatctccagacgcaaccagaaaaactagctggacgtccattgttgttctggcatgggacggaagatgagaaaataccttacgccgatgtagaaacctttgtgcaagggaatccagaagcgaatctgacatttatctctcgcgaagaacgacatttagttcgtggagagaccatggatcaggtaacggccttttttgttgaacaattaggaaaaagcactgattcactctgacaacaaaaaacgacaggtatctaggtaagcaaagggattgtgtggttatgtacaagcataaaattcgtgttcttcatttttcttttttatactgtagggtggaaaaaaggaggaatgactgtgaactatcgcgttttattattttataaatacacgaccatcgaagatccagaaagttttgcgaaagagcatttagcttttgggaaagagatcggtatcaaaggtcgaattcttgttgcgaaagaaggaatcaacggaacgctttctggaacgattgaagcaacggatgcctatatggaaaaaatggaagcggacccccgtttcaaaggaatctactacaaaatcgatgaggtggaagaacacgcctttaaaaaattgtttgttcgaccgcgaaaagaattggtgtcattgaacttagaagatgatatcgatcctttagaactaaccggaaagtatctagaaccgaaagatttcaaagaagcgttgttggatgaaaataccgtagtgatcgatgcgcggaatgattatgaatacgatcttggtcattttcgaggtgcggtccgtcccgatatccgcagtttccgtgaattgcctcaatggatcattgagaacaaagagaaattcatggataaaaaagtggtcacttactgcacaggtgggattcgctgcgagaaattctcgggctggttgttgcgagaaggattccaagacgtagcacaacttcacgggggaatttttgcttatggcaatgatccagaagttcaaggagagttgtgggacggtaagatgtatgtctttgatgaacgtatcagtgttgagatcaatcatgtcgacaagaccgtgatcggtcgcgattggttcgatggcacaccatgtgagcgttacgtcaattgtgcaaatccagagtgcaatcgtcagttcctcacttcggaagagaatcaagcggcacacttaggcggctgctgctatgaatgtgccgccaatgaaaacaatcgttacgtcattgagcacaatatctctcaagaagaacaagcagcagttttagcacaactagcgtctgaagtgacggtttaaaaagatcctgaaaaggatctttttttgttctttaattatctgaaaaatcaaacgattccaattgatttttttaacaaatttcactttaaaaaaggcaagctcctcgcatatttgtttgatttggagtaaactatacctaattgtcagataggaaagaggaatagagatgaaaattgttattgctggtgctggtgccatgggcagccgatttgccattaaattaaaaagaggcggcaacgatgtaacgttgatcgatggttggccagcgcatatcgaagcgatccgtaccaatggactacaagcaaatttggatggagaagaaatcacagaatctttccccatttatccacagtccgaagtaacggcggatacgccagcggatctgatcattgtttttacaaaagcgatgcaattagaccaaatgatgcaagacattgcttcactaatcggtgatcaaacaagagtactttgcttacttaatggcattggacatgaagatacaattgaaaaatatgtcgctaccgataaaattttcttaggaaataccctatggacagcagatttgattggacctgggcaagttcgattgtttggggaaggatcggttgaactgcaaaacattggtgaaggcaaagaagcagcggccaaagaactggctgaggtactaactgcttctggattgaatgcgtcatactctgaaaatattcgctattcaatctatcgtaaagcctgtgtcaatggtacattgaatggtttatgttcaattttggatgtcaacattgcacagtttggaaatacagccactgcacgacaaatggtgcaaaccattgttggagaattcgcagctgttgcggctcatgaatcggtagaactagatgttccagaagtcgttgcccatattgaaaaaacctatgatcctgcaggtattggcttacactatccttccatgtatcaagatttgatcaataatcatcgtaaaacggagatcgattacatcaacggggctatttcgcgtaaaggtcgaaaatacaatgttcccacgccttattgcgacttcttgacccaattgatccatgccaaagaagatgtgcttgaagcgaagtagtagtaaaaataaaaaactatgatataagtctaataataaaagatccgaatcatctatgtaatgccctggtagtttaggagaacatcgtcacacattttggacgttcaggagcaatcaaacatttatggtccggatccttttttttgttcatatcgtagtgactttaattcaattgacgataaagaatttttcctgctattgcttattacaaattttacttgtgattaattaactttttttgaaaagtgacggtattgagtaggagtcatctgcattttgttttgaaagagcttgaataaggagggcgtactcttgtaacctaaattttcagcgatagtatcaatagtcatggaagattctctaagtaatctttgtgcttcaatcaaacgtttttggtcgatcatttcttgaaaagtcgcgccagtttttgtcttgagcatattacctaaatagttttggttataaccaaactccgtggctaattttttgagagtgatagttgtgtaatgatcgttaatatattttaagagtgcagctaaatcatttctttgagaagttaacgacagttcattcaaactaggaattgctgctaattccaataaacatgatcctaaaaggagacttaaggaacgatgatagaagatttctttgagataaaatttgtgaatcatcaagaataaaagctgattgatgatcgcgtgttcttttaaatcaaaaactaaaaaagtattatgaacactatcctttttagcagcattcaaaaagaagtccgtgactggattacttgaagcgggcaagtggttcaagagctctgtttgtaaagtatgtttgtcaattaaaatattgagaatcaaatcatcttttcctacataatcaatttgctgaatcacttcagtgtccataataatcaattgctgttcagtgaacctccatgcctccccgtttattttttgccgacaacatcctcttagaaggtaattcatttcaatgaaactatgagtatgagcaggcgtataagagtagcgatgatgcttattgatataaatagatccctcttcaaaaaaatcattaacgggtatttttggaattactgatccatgatagtctaaattcatttcattaatattcttcccagtagttctttgctgggcttcaattcgatcttctatatcaaaaagtttaatcaaactttccatccgtcaatcacctaatttttttatatagttagttctatatataagttattcccaataaatagtcaatatttactttgctattaaagggtttgtcagatcaaacaaatagcctttcaaaaaaattcaaatttatgacctgtgaatttgatagtaaagacctacatttttgaaattgtaccattttatgtaagcgtttaatataaccctatgaacaagaaagggtgtttcaaatggacacaaatggaaagcagcaatcattagtgaaaaagtattctcttttagcaactgcagccggtgtaggttctatgttgggttctggatgtatcgtcggtctctcggcaactataccggtttggcaaaaagggttgaacttatctgcgggacaagttggattaatctctggtgcactaacctttgcaattgcgttcggctctttgtttgcagggcaaattacaaaaatcttcggcctgattcgagcgttcaactggatcaatttgttttatgctattggagcagcaatttgtgtattttcaggaaattttgtggctttattattaggagtcatcgtcatggggattgcatctggggcggatttaccaatcagtttaaccgttgtctctcatgatgcaccagatgaaaaaacttctgcaagtttagtatcttcgacacaaatattttggcaaattggtatttttatttcttatatttgttctttcttactttccggagtcaatggagttttgggagcgcgtattgtttttgttattttattggtcttttcaatctttgcgtgggtttggcggacagtctcaaaaaaatttcggatgttccacgaagaaggtgcagcacgtcagtctgcgttgaatctggttagcaatcaacaaaaaatttcactaaaagagatttttagtgggaataatgcaaaaatttatcgcaactttttcttcgctattttagtcttttatgtttgttggaatttgttagcgaatacatggggacaatttcagacatacgctttgactaatgctggtgctacacaaatgcaagcaacagggctaggtattgtgctgaatatcatttctttagtgactacgattatctttgcttcagtagcgggtggaaagcatcggaataaagcattttttgttggcgcttttgttcaattcatggcaatggttggtatggcagttattggcggtagtgcaggattcatcgcattggcgataacgattgctttttataattttggaaatccattagcaggggaagccatctataaagtttggactcaagaatcatttccaacagaatctcgggcattcttacaaggcattatcaatggtttttcacggttgtgttgcggattgtttgcctttgtcacaccatttttggtatcgccaaacaatattcaattttcgatgtatggctttgcggcgattgttctagtagcagctattgcaggagctgtcatgatgaaattgcaaaaaggagctaaaacgagagcaaacagtcgaagagattctaatctagctgatttagtaaagtagttgatcgatagaatataaatgagtaaacgaaaggaacggataatagtgataacaaatgaacggccacgatggatctggtatgctggcgattttgaaatacgtcaaggacttttacaaaatttttctagagaagaacgaggatacgattggccagcttactggtatattgatgactgccataaaaatgtaaaatttaaacgtgaatatgaattacaaagtcccacgacatttgttgtatatgcaacagggattggctttgtagaagtgaatgaagtgaaatattcttttgaacaagagattgtctgtcaacccggttttaataagattagggtgaatgtagggaatccaaacggtttgccagccatctatattgaaggagaaagaatcaagagtgatgaaggctggtattgcagtaactttgttgaagaagctccagtaggatggagcaatctttatatgaataaagagcaagaccctaataaagtctattatgaaatagaaacttgtttccctgtttcgaagacggcggttgctggcggcacgttgtttgattatggacggacgattttcggttcattaatgatcgataaattgttgtcggagataccgatatctatttgctatggagaatcagaagcagaagcatgtgatagtcaaatgtgttattacaaacaggaaaatgtaagaaaagaaacaaacattcgcaaacgtgcttttcgttatcttttcattcctaatatagcaccagaagcaattgatattcgtgcgatgcatgaatatcttcccttacacaatcaagccacattcaaatcagatgactctgtgatgaatcgaatatgggatatatctatagaaacctttacattgtgcagtgggcttttctttattgacggaatcaaacgagatcgctggatctggtcaggggatgcttaccaaagctattttatcaaccaatacttattctttgatgaagatatcaataagcgaacgatcatggcattgcgaggtcaaaatgaagtaaaacagcatatgaatacaattgttgattattccattttatggatcatagggattgaaaatcactatatgatgtctggggacagctcatttcttgcacagatttattcgaaaatggtgactatgatggactatcttgaaaaacaaacccatgagttaggatttatttatggtcgcgaaaaggactggatttttattgattggtctgaaatggataaggaagggacattggcagcggaacaagtcctgttattgaaagcatacaaagctatgactgtttgtggctctatcttgaatcgtgatattgatcactatgtgacaagatatgaacagttgaaagctaatttaatgagttatttctgggatgaagaaaaaggggcatttattgattcttatctatctggaaagagaaatgtgacacgccatgccaatatttttgcggtcttattcgactttgtagatgaaacgaaaaagcaacaaattttgaaaaatgtattgcttaatgatgaagtcactcaaatcacaactccttacttcaaattcttcgaacaagatgccctttgtaaactgggacagacaagtcaagtacatgagattattcttgactactggggtggaatggtggaacaagaagcggttactttctgggaggagtatattcctggagaaagtggaaatgctatttatgaaatgtatggggatccttttgggaaaagtttatgtcatgcatggggagccagtcctatctacttattaggacgttatttcgcaggaattcaacctattcgaccaggttatgaaacattcttagttgaccctaagctcgattcttttcatcaattaacgtgtatattcccagttaaaggtggctgggtgaagattgagaagacagatacgtgcttaacaatttgtacaaatcgagacggtgggatcttgcggatagatggaaaagagcagccaatgtttgccaatcaacctgtaagttatgaggttgtaaaaaaggtctaagctggattcatcaaagaaaggaagaaagcaatgaatagtgatcggttaaaagtgtctgaaaaactcggatttgccttaacaaatctagggaatatccctattatgacactattaaatacgtatttgttaattttctatacggatgtcattggtgttaatccagctttggtaggaatgttattccttgtttcgagacttttagatggcgttagtgatccacttattggttttgtgattgatcgttttccaagaacaaagatagggaaatacaaacctgtgttgattttaggagtcatcatctgttgcttaaactatttgcttgtttggttttcgcctctcctatttccagctcaaaaaatcattgctattagtatttcttacatccttctaggaattacttttgattttatggatattcctttgaatagtttaatccccgtactgacgcaagaggatgaagggcgtaatcaactttcatcaatcaaagggatttcatatacggtaggtccagctatcttaaatgtagcagcacctttggcaatcgcagcttttgcaacgtctttgaaaggatacgttttattgattgtagggacggtactagttgttctattttttacgattgtagggacgttgatggtaaaggaaagagggacggaagctgcctatgtaacaaagccggtaaaagaaaaatatacaatgaaggatgcgttatctgtattcaaactgcgtccagttgtttcattgtttctagcaatgctattcattacagcggcaacgaacatcttcaatggttcacttctatattatcttagttatattattagcaaccctaaattattgagtgcagccagtttcttaggtatgctgggggcattggcagcagggcttctggttccaaaattatcgcagcgatatggaaaaaaacatctgtacattacaggtttggtattgatttcattatgtatgctgggatttctggtcatcaatcatcactcagccgttttcgttttatgctattgcggggtgcaatttgcattagggttgacgaatacactgcaatacagtatttcggccgataatgttgatacgataagaaacgaattagacatagaggcgacagcattgattgcttctctcacttcattaatcatgaaatttgcgatggctataggtggtgctgttccgggatttgtgttaagttttaccggctatgcagcgaatcagtcaaaatcaagcactgcggaaaaagggattttattcgtgactttcgttatcccgctgattttatatgtagtgacgatcgctgtgttcagcagtggttttaaaagtaacaaaattaaaagtttgcatgtgcaaaaacgaaaaacaatgaactaagagcgaagtagcattttcattaaaacgatcttaaagcgagaaaaatctatcttgaagatggaaagaaataaatccattctccggatagattttttctgctattgttattcgactagctatacggatgcttcgcaggaagaagtttttgtttacagtatcctccctcaaccttcaggcaaatctgccatgtatctttcggttccttgaaagacggccaattgttctacaccgaaggagcacagcatctggctcatttcggcaaataacaagcgataatcactggacttatgcgcatctgaacctagtgtaaagagtttgccccccacactttgatagagcgggatcgcatattcgtaaagtgatgcattttgataaggaccaaagcttttggcattgacttcaaaagctagctcgcgagcgacgactttcttgaaaataactgtcagttctttttcgaaatgctgtgcaagttcttctgctgtaaagtcgaagcgccgcaacccgtagtcaaaatgggtcaggatatgtccgtcagaaaaagtatctaaaactgtggccatctgatcaaaataagacttgacgacggtaagtttgtctttctccaatacggcatcatccatatagtcaaaggaaccgttttgatggatgctgactaacttcaggtcataaggatgctgatccagatagtcgcgtatttgtgtttcttgcccaggaacgacaccgatttcgatccctttcaaaagtttcgttgctgtttgttcctgtaaagtctgatggcattgttgaagctgttcataatcgggaatatcatcgcgataatttgaataagggttcttgagatcaaagtggtcagtcgccacaaaaaattccggttgaaaagctaaataattttcgaagcgttcttctgaatcaaaagataaaaaagtatgcaaatgctgatcgtagtaattcataataacctcctttttgtacaagataccataaaaagcgagaaacgactattttttcataaaaaatcagaaaagcatttcgtacaaaaattctttgttctataatggatgagaatggaagcaaaggagtaaatagcagtatgagtatgtatcttgagattccggaatttgaaagcgattttcgctttcggacattccttaatgatgggctgacgatcgtttatccccatgtacataaagaaatcgagctgatttatgcgaaacgaggaaaagtcaatattggggtagctgatgagatcattgagttggaagaaggcgagctgtacatttttgccagtggccagccccactattttttggcttctccagagagtgagcgttatgtgtatcagtttgatttcgcactgtttgatgaaaccattttgcgagaaaaagaactttctttaaaaacactttttgacgagggggaaccccacagcaagcattggccagtcagttttaccgaaaaaatcacaggattgttgatcgaactctaccagttagaggaagagcaagtagctggtaaacgctatttgactatgggttttttgtatcagttgatcggcgaatgttatcaagggttgccgccgcgtgccaaaaagatcgctcctttaaaacgttctgcagctcaatacaaagaaacgctgcaacgtctggatgaagtgtttgaatatattgaatcccattaccaagatgtcttaacgatggaagaaacagcgaagcatgttggattcagtccccattactttacccgcttttttaagacgaatactggaaaaacattcatgcagtttctgacggaataccggatcaatcaagccaaattcattttggcaaacgagaaacttccaatggcagaagtagcggaaaaagccggatttgccagtgtcaaaacgttccatcacgtgttcaaagagaccgtaggacaatccccattgcagtatcagaaacaattaaataattgaatacttgatgaaagctagatcaacgagccaatcttgtcaatcactcgaacccttgaacaagcgcaatttttaagcgattgttcactgtttgtttgggtgcttttatttggtgtgaaggagtctttgattcgttttagtgagagttccataagataaatttcgggaattttttaagaggaaattgggaagaacctgtcaaatcctttcgctataatgaatgagtagaaaataataagcgttttcaggaggaaagagatgacagtaagaattggaatcattggttgcggtgggattgcgaatggcaaacacatgccggcattatcacaagtaaaagaagcggaaatggtcgcattttgtgatttgatcgtcgaacgagcagtggaagctaaaacagctttcggtacagaagatgcccaggtattcagcgactacaaagaaatgttagcagaagctgaattagatgttgtgcatgtttgtacaccaaatgcttctcacgcggaattgtccatcgcagcattagaagcagattgccatgtaatgtgcgaaaaaccaatggcaaaaacgacagaagaagcaaaagcaatgatcgatgccgctaatcgaacaggcaaaaaattaacgatcggttatcaaaatcgttttagaaaagattcccgctacttgcacgaggtttgtgcggaaggacaattaggcaatatctattttgggaaagcccatgccatccgtcgtcgtgcagtaccaacttggggtgtctttctagacgaagaagctcaaggcgggggaccattgatcgacatcggtacgcatgctcttgatttaacattgtggatgatgaataactaccaacctaaatttgttgtcggaaaagcttaccatgaattatctcagacaaagaatgcggcgaacgcttgggggtcatgggatccagagaagttttcggtagaagactctgcttttggatttgtcgtgatggaaaatggcgcaacgattttcttggaagctagctgggcgttgaacagtttagatgtcaaagaagcaaaaacaacattgatgggcagcaaagctggcgcggatatgaataatggcttaacaatcaatggcgaagatcatagtttgttgtatgaaaaaaatattgagttggaaactggtggtgtcgacttctatgaaggggacggcgaaacgcctgaaatcttggaagcacaatcttggatcaacgccatcatcaatgacacagaacctgtggtcaagccggaagaggcaatggtagttactgagattttagaagcaatctacaaatcctcagcaactggcgaaccggtctacttgtaaaagcagtcgctaaaaaggagcaaagcatgaaaccaaaaatcggactacagttatggagcatccaagaagcgtgtaaagaagacttgttccaagcacttgaaagtgtcaaaaaaagcgggtatgacggagtcgaattcgcgggttactacggttattccgcaacagaggtctcaaacgcgctaaaagaatacgacttgggagttgctgcttctcatctaccctttgaaacattgcgggatcattttgaagcaacactggcctatgaaaaagcgatcgggaatcaccgactcgtggttccatatgcttcatttgagacattcgcagaatggcaacagtttgcccgagagtttgcagaagttgctaagaaagcagctgctcagggctttgaatgctactatcacaatcatgcccatgaatttaccgagattcctaataaatcaatgattgaagaattgttagctgaaaatccagcacttaaattagaagcagatctttattggatcgcttattccggcactgatgttttcacttggttgaaagaacatcaagagtccgttggtcttttgcatatcaaagatatgcaggaagaaccaaaagaaagcacagaaatcaataatggcattttacctatcaaggactatgtcacagttgcgcaacaattccaattgccttggttgatcgtggaacaagaagcgttccaaaaatacgcacctttagaagcgacggccatcgattatttgcaattaaaagctatcgttgaggaggtttaccaatgatccatgtcactgtttggaatgaatttagacacgaaaaaacagatgaaaccgttcaggcaatgtatcccgaaggaatccacggacaaatcgctgcctttttgcaagcagatgattttcaagttcgcacagcaaccttggatgaaccagaacacggattaacaaacgaagtattagctgataccgatgtgctcgtttggtgggggcatatggcccatgatgaagtacaagacgaaatcgttcagcgcgttcaacaacgggtgttagaaggaatgggtctgattgtcctccattctggtcacttctcaaaagtcttcaagaaattgatgggcacttcctgtgacttgaaatggcgcgtggatgatcagcattgtcgaatttggaatatcaacccgagtcatccaatcgtagaaggtgtcggcgaatttattgaacttgagaaagaagaaatgtatggggaacactttgacatcccaactccagacgaattgatctttgttagctggttcccaggaggcgaagtcttccgcagcggctgcaccttccgtcgtggcaatggcaagatcttttatttccaacctgggcatgagacgtttccgagttattacaacgaaaaagtacaaaaagttatcaaaaacgcggcacgttggtgcgcaccaacagaaaatacgtacccaacgtacggccattatcaagccaatgaggaggtaggcaaatgaaattaggagtatttacgccattattcaatcatttaacgtttgaagaaatgatcacagaagttgcagaaaaaggattgcagacagttgagatcggtacaggaggttctccaggcaatgcccacttggatatcgataagttgcttgctagtgaagcagaccggaaagaatatttagctaaattagccgacaaaggactagaaatctcggcgttaagctgtcacaacaatcccatttcgcctttaaaaaatgaagcgcaggaagcagatgaattattacgcaaaacgatcaagctggccagtttgatgaatgtccctgtcgtcaatggattctctggtgtttcgggaggaaatgcaacagacacgcaagtcaactggcctgttctgccatggccaacggaatacgatgataattacaactatcaatgggagcaaaagctgatcccttattggaaagaaatcaataccgaggcagaagctgctggtgtaaaaatcggtattgagctgcatggcggattcttggctcatacgccttatacgatgttaaaacttcgcgacgctgcaggtaaagcaattggttgtaaccttgatccaagccatttgtggtggcaagggatcgatccagtggcagcagtcaagattttaggtgaagcagatgcgattcatcattttcatgccaaagatacgtatcttgatcaagataatatcaacatgcatgggttgacagacatgcagccatacagcaatgtcaaaacaagagcttggactttccgctctgttggctgcgggcacagcttgcaagtttggtcggacatcatttccgcattgcggatctatgggtatgattatgtcttgagtatcgagcatgaagatccaatcatgtctgttgatgaaggattgaaccgagcaatcactaatttgaaatcgattatgatcaaagaagaaccatccgcaatgtggtgggtgtaacgaggagtatagaaaatgagtgcaatcaattttgttgtcatcggttatggcggtatgggtgcttaccatgtgcacaacatcctgccgaatgaaaatgaacggatccatattgtgggaacctatgatatttcggaagaaagacaagctatttcacaagaaaaagggcataaaatctataaaagttatgaagaagtcttagcagatgaaaccattgaagcagtgctgatcgcaacgccgaatgatttgcataaggatttgtcgatcgcagccctcagagcgggtaagcatgttgtatgtgagaaacctgttgctttaaacactgctgaactagacgaaatcgttgctgtggccaaagaaacaggcaatacatttatggtccatcaaaaccgtcgctgggatccagactttctgatcgttcgcgatttatatcgtaataggcagatcggtgatcttttccaaatcgaatcacgggtccaaggtgcaaatggcatcccaggtgattggcgccatgtgaaaaaacaaggaggcggcatggtattagactggggcgttcacttgttggatcaaatactttggttagtggacagtccagtgaaagatgtgaaagctgacttaagctatattctgggagaagaagtcgacgatggattctttgctttgatcacatttgaaaatggtgtcaaagcaatcgtggaagttgggacctccaattacacccaattgcctcgctggtacattaagggaattgaaggaactgctacgatccaagattgggcgttgaatggtaagatggttcgggcaactggccgcgaagatgttgccgcacctaaacctgtccaagcaggtgttggattaacgaaaacaatggcaccgccatctgaattggctgcagaatcaatcccatttccagaagcgaaagccgattttgatcctttctacaagaatttttatcatgtagtccgtcacggtgctgaaccaattgtcaaaaatgaagaagttcgcaacgtcatggaattgatcgaacgaatctttgccgtagccagcgcaaaataagagcaatcaagacacagaaaaacgaatcccgccatagcaaatgatccctgttaaatcttgcagtcaaaggagagttaacagagatcatcaagtgatgcaggtgattgtttgcctgtgtctttttttattccgaaatataaaaattgaaaagcagatcctgcgggtaattgccccaacgatcgccaaaaatagttagaccgccagcgttttctgcggttgccggtgctgcaattttgaatgtaaagaaatcactgtgatccaaatcgatctcgcttaagttatggtcggtcagcttttctccgtcgatcgaagtatcaaaacggttgatccgcagatgtttcaacaagccgtattgactgaactcatcgatccaccattgaggggtcaatgccccccgtacatctgaaaagtttcctggaacagtataggttcctaaacagacatcgttgatatagaaagaaatatcactcggccaataattattggaaatagggaattcagaagcaatctccatgctgatttccagcatttcgattttttccccattttttagcggtttcggaattttgtactctaagaatccattgtttaaccagataatactggcatctactcgttcttgtgccaaaaaggatttaggatcatccaatgcgccgatcaggcgatcttttgtagccattccacaagaagcttcggctctaaaatcagtgaagtgaccaattttcacaggtaatgaagtcaaattcatttctggaaatactttttcggggaagttgatgttgatgaaatcagtctttaaagctagaaacttctttttccaatcttttcccgttcctttttctaatctgatcaattgtgcctgctctaattttttgatgtgcttggtcatgagtgcgttgctgattgccagtttttccccaatctcactgatgctttttctttccccgcctaactctctcaaaattgccaaacgcgtctcattggctaaagcttcataaaccggtaaagaggttttctctaaatttaattccattctattcacctcgttatacttttttgttaattgattgcgcaggtttattataacataacttgatgattttacactatagttaaacgatataaatattttattttagttgttaaatagctgttgacagcgctttattttgatgttaatttaacggtgtaaacagtttggtttttattgttgttgaaaaaagtaaagtgagttggaatatcgttttacaaataagttaaataataggagcgtggaaaaatgaaatttagtaaagcagctatagtagtaggggcgacgttgctgtgtggcatcgtattgtcagcatgtggaagtggcggcggcaactcaagcaagagttctgaaattttgttatggtcatccacaactggaccagatggggagaaaatcaaaaagacgattgacgaatacaatgcgacggatccggatttcaaagtgaaattagtgagtatgcaaggggataccttcacctcaaaactaactacagcaggtaaatcggggaaaggtgtaccagatttggctttagtcgcttcagaagcacttcccacctataagaaccaagagatgctggattcttgggatgacatgatcaaaggtacagagctagatcgcagcaattatgttgaagcagcttgggataccggtactcttgaggacagccagtatgggattcctgccaccatggggtcgtgggtcatgtattacaacaaagatctggtagacaaatacattcctggagcattagatgatggcatcgtgacttatgaagaaatcaatcaggcaggtgaaaaagcaaaagcagatggcgtttatagctttggttatacctgggggatgcagaattattccaatctatatcagcaaatgggcggacaatggcaagatcaagatggcaaaatcaatatcgataatgagtattcgtataacacggtacaggaattcaaaaatttgtatgatgcgggctacatggtgccagacggggaagatgccaataaactttttgcgaatcaacagttgatcttcttgccggaaggaacgtggatgttgagcaatatggaagaaatcagtgactttgagtggggagaaacctttacaccgcaatgggatgcggaaaatatcgttcaaggatcgggagttgatcagtttgcgatgtttaagacaaaagaagaacgctctgatgaaaagaaagagggaatggtggatttcttgacttggttgcaggcaaaccagttagaatgggtgaaatctggcgccaatccaacttcactagcgatgcttgacaatgaggaatatgtcaagatgccgcaatctttcttgttgaaaacagaaaaaggacaggcggcgatctctgtgaatgcagtcgatggattgtcttacatttttgatgaatacgacaatcgttcttgggacatgatcactggaaaagccgatattaaagatacctttggtgaaatccaaaaagtcgtggaagagaaaatgaaataatcgcagggtctgtgacaaaagctgaaggcaaagaagatagtgatcaggcatgtcgagaagacacataccaaaagaggactcatataagatttctcaaagagtggccttttgatctggttagcttggcaacttacacgaaagagcatcttccatgcagaagtggtttttgtcacagtctttttctagtcgattttatcaaggcatgaaaggatgcgtaatgtatgagtagcaaaaaaaagctcagtggttggcccgttttgtttatcggtccccacatgattctttttattttattctttttggttcctgctgtaattggtgtttatgtttcctttaccgaatgggatctttttagttcaccgatttttattggtttagacaattttaagacgattctatttgatcaagactcgctgtatcatacgcaatttttcaatgggatgaaaaacacgctattctttgcagtgatatcagtacctctgtgtatcgcgattccattgctattagctgtggcattgtccgcaaagccaaagatgatgcgcttttttcaatcggttctttacttgccgacattgtttgccatctctgctgtaatgatcatctgggggtttctgttaagtaaatcctttggccccatcaaagaagtttttgggatagatatcaattttgtcgggacacaaccatgggcctggatcgcgattttgatcgtaacgatttggtggacattaggaggaaatttgatcatttatgtagctgcgttgaacggtgtgcccagggaacaaatggaggcagccgagcttgacggagccagcagtgtagtgaagtttttccggatttcgttgccgagtattcggaatcagctgatttttacaacagtcatgacgactattgctcaattcaatatttatggacagccattgatgctgaccgggggtggtccgaacaattcgacgagagtactcatgatgtatattcaagagaatgcttttggcagtagtacgtccgttgctggtatgtcatcggcgatggcgattttactagggatcgttatcatgatcgtttcggtctttcaatttatcatgatcaaaaaattagagaggtaaggggacagccatgcgagaaaataaagtaggaaaaagagtcgcatttatcgtattagctattgtttgtattgtctggatttttcctctgatatgggctatttttacctctttcaaatcagatgctgagatccaaaaagttggctttagcctgattcctaaagagtggactttcgcaaactttttagggttgttgcaggggaatgattcatcgccagtctttcgctggtttttgaattcgatgatcatttcaacagcccacacattgttggtgatggtgatcgtttcttttgcggcttatggctatacacggctgacgtttaaaggtcgagacttgatttttgcattattgctgggaacgatgatgtttcctggtgtcgtcaatttgatccccaatttcaaaatcgtggatacattaggctggaccaacacatttctagccgtgatcgttcctggcgcagcaggtgtctataacatttttctagttcgtcagtttatcttagggattcctaaagaattggatgagtcggctgtaattgatggggccaatgaatttcagattttttatcatattattctgccgctgatcaagccggttttaaccgtcgttgcgttatttagttttactggttcgtggaacgacttcttgtggccttctatcgttatgagcgatattgataaactgcctatcacgccgggacttcagttgctgcaagggcaatatatgacgtatccgggagtaggagctgcaggagctcttttagcattgatcccgacattccttttatatttagtggcgcaaaagagtttcatggaatcaatgtcattgcaaagtggtataaaataaattgttttttggaggaactatgagcagaaatgaataccctagaccccagtttcaacgagaaaactggctgaatttaaatggagaatggcacttcgcctttgatgataaaaatgtaggactaaaagagaaatggtatcaagaggaggaagcctatccgcatagaatcaaggtgcccttcgtctatcaaagcgaattgagcgggatcaaccaacgagaacctcacgatattgtctggtattaccggacattcacagtgcaggcaatggacagtcaacgtgtagtcttgcattttggtgcggtggattacgaggcggatgtctttgtcaatggttgtcatgtaacgaatcatcaaggcggtcatacctcttttgaagtagatattaccgattatttggtcgacggtcagcaagcgataagtgtgcgtgcatttgatcctcatgcagatgaaagtattcctcgaggaaaacaattctgggagacagaatctgctggtatctggtatacgaattctaccgggatttggcagccagtatggctggaagtcgtttcagagacttatttgaaagaaatcaatctaactccaaattttgatgaggggaccgtgactgttgaaacgatcttgaatcagttccagccgcagtgtgaactggactatcggatctcttttaaagaacagctaatcgcagcggggagactgtctgcagattcggcaaaaatgaagttcaatgccgatctttttcaggaacatattttcagaagcaatttccatcatgacggttggtcttggacaccggaaaatccccagttatttgatattaaactttctttaatcaacgatggagaaacaattgactacctgaaaagttatttcggcatgcgtaaaatccatacggaaaacggcatggtctatttgaacaacaaaccttactatcaaaagttgattttggatcaagggtactggcctagtggcctcttgactgcaccgtcagatgaagactttaaaaaagacatcttactagcaaaagaaatgggcttcaatggttgccgcaaacatcaaaaaacagaagatccgcgctttttgtactgggcggatcagttaggttttctggtttggggagaatgtgcggctccggcgatttacaatgaagattctgttgaacgactgatgcgggaatggaccgagatcattgccagagactttagccatccctccattgtgacttgggtgccgatcaatgaaagctggggcgtgccaaagatttcctttgaccgaacacagcaacatttctctcaagcaatgtatcatttcttgcacgcattggataaaacacgattagtgatctcaaatgatggttgggcaatgacagaaacagatatttgcgccattcacaactatgcccatggccaaaaagaagaaactgagaaatatgattactttaaagaaaccctccgaactcgcgaaaatctgattaagcggctttctactccgtggccgatttttgccaacggcttttcttatcaggagcaaccaatcttgttaacggaatttggtggcatcggctttgatgtatcgggacaaccaggttgggggtatacgtcagtcgacaatgaagttgaattcttaaaggactaccaacgggtgctgtcggctgtctatgcttcagtagggctctggggatattgctatacgcaattgaccgatgtcgaacaggagatcaatgggttgttgacttatgaccgtcagcctaaagtggacttggcagcaatcaaagctatcaatgatcaatttcatgtttctcaagttgaatgatatgcagacggcaacattggaaaggagagacaatgagaaaaaatggtattatttgtgcattgattttggcgactcctttcgtaggaggttgcggtacttctcatgaaacgctggttgacgatttcacagcgatcatcgacaacgatggtgcagacccgtggatttttcaagatgagaaatattattattatacgaaaactactggtaacaacttaaccctttggcgttcggaaaatctgactgaagtagcagcgggggagaaaaaagtcatctgggaaatgcctgcggagtttgaaagtatctgggcaccggaacttcatcagctggatggtacgtgggtcgtttattttgcggccaatcatccctcagaaacccaccggatgtatgcactagtcaacgaaaaccaggatccttacagtgatgattggcagttggaagaaatcaaaggactggatgacaagtttgctattgatggaactgtcctcgaattagacgaacaacggtatttcctttggtcaggttgggaaggatatgaaaatattgcccaaaatatttatattgctgaaatgatctcacctacagaagtcattggtgaaaagcagctgatttcgactccggaatacgaatgggaaatgcggcaaacgccgttgattaacgaagcacctcaagtgatcatcaaagaagatacggtaaatgtggtctattcggctagtggaagttgggacaatgattatgcactgggacttttgacaatggatcgccaagatgatccattagatacccgaagttggacgaaagaatccgaaccgatttttcagcagacagaaactgtttttggtcccgggcacaatgggtttgccaagtcgaaagacggcaccgaagactggttgatatttcacgctgctcgttgggatcattctggctggcaacgctcgattcgtttgcagccaatcaaatgggaagaaaacaagctgaaattagaagttcctttagcggataatgaaacacagaagcttcccagtggtgaagcaaaaaggatccgaatgaccgccagtgatgcgcttcttgaaggtgatttagtaacagtgacagacgaggaagcattgatgaaaaaagtggttcaagggtttgaatcgaccgaagatcgtttggtttttcaaccaacaatgggacaggctagtgaagcgacggtcatcgtttatcttaaaactcaagattatttgtcattgaatgagcccgtgtatgttcaactgaaaacagatgatgacagccaacgtttggcggtctatccgtcacaatactatcagcctatccaaactactatgaatttgaaagcaggcactatcaaaatcgaagtgtcttcagaaattggggtcgacacactgagtgtcgatcggatggagatcataccaaaagagggagaatagtttctagagctgctttcagtggtttagatatcataacactgaaagcaatggcgtggctcaaatggccatgctgtgatctgtcttgttcaatttagggctgttcttcgatccgaatgaagcaaactaacatcctaaagcagtgtcatggacagacgtgccatgatactgttttttttttgagtaattaggatgagccgctgatagagctctaggccaagataggcagttttccttcttccatgtataataaagacaaatgggacggagcaaatcgttttacaaagtagacgtaaaagtaaatgcaaatgaggtgaatggatgaaaaccaggcaagaaatgattcgatcttcaaacggcaaagatcaactttatgtgaaaatttggcagccggagggacagtccaaaggaatgcttcagctgatccatggcatgattgaacacattgaacggtacgatccgtttgctcaatatctcgtttcaaaaggattcacagtgatcggtcatgatcacttgggacacgggaaaacagtagctgagcaaaacgagtatgggacatttggagaaacaaatggtgcggattatcttgtagcagatgtgggattggttcagcgttttgcgttggagcagtttccagctcaaccttattatcttttaggtcatagtatgggctctttggttttgcgcaattttttgtatcagaaaaatacaaaattggcaggagcaatcattatggggacgacactggaagcgccggccaaaatgaccagtgccgctttattgacgaagtcgttgatgccttttcgacagcaagcatggccctatcgcgtgatggaaaatctggtttttggtcaacataatcggcggtttcagcccaaccgaacggcgaaagattggttgtccagtgatccccaacaagtagatgcttatttagcagatccgcatacgcaatttcatttttcattaagtgcctatcgagatttgtttttattgacaaaaaaagcgagtgccccccgcctgttgcagaaaatcgatcgcgaattgccgttactgctgatttcaggaaaagaagatcctgtgggccattatggcaagagtgtccgtaagctagcaaactatttgaaccagcaagggcagcggcatctgacagtttatttgctggaaggcggtcgtcacgagatcttaaatgaaaccaataaacaagtcgtatttcatgaaatctggcaatggttagaaagcaattgaggaacgttatcaattgctttcatctttttttcagaaaattgagaattttaattatttttaaccttttttcatattcctccttctgctataatgggtgtcacatctaacaacaaaggagagatttttgtatgactgtttataacttttcagctggtcccgccgtcttgccccgccccgtattggaaagagctcaatccgagcttttggattatcgtggcagtgggatgtccgttatggagctgagtcatcggtcttccttgtttgaagagatcattcaagacgcagaagccctcttgcgggaattgatggcgatcccggataactatcgggtgctgtttttgcaaggtggagcaagtctgcaatttagtatggtgccattaaatttagcgaaaaacaaaaaggccctttatatcaacacgggctcttggtcaaaaaaagcgattcaagcggctgaagcagttgctacggttgaggtgatcgcatcaagtgaagataagcattttacttatattccagaaatcacagtagataacatcgaccaaacagcgacttatctgcatattactacgaataatacgattgaaggaacagcttttcagacgattccggatgctggcaaagtcccgatcattgctgacatgtcatcaaatatcttggccaatgagtatcgtgtagaagatttcggtatgatctatgcaggtgcccaaaagaacattggaccagcaggattgacggtggttattattcgagaagatttattaaatgaagaagcggtctttgctccaatgttggactatcgtcttcaagctgacaacggttccctttacaatacgccgcctacttacagcatttatatcgcaaaactggtttttgagtggttgaaagaattaggcggtgtagcagcgattactgcgcaagaccgacaaaaagctgcactgctctatcaagcgatcgaagcatcgaacttgtttagcagtcccgtagacaaaaatagccgctccctaacgaacattccttttatcactggcgataaggagctggatcgacaatttaatgaagctgcagaagcagccggctttaaaaacttaaaaggacaccgttcggtaggcggtatgcgagcaagtttgtacaatgcgttccctatcgaaggcgttcaggcacttgtcgatttcatgaaatcattcgaagcggaggtcaaataaatgtatcagatcaagacattcaatgcgattgcaccagaagggcttcaaaggctaaacaaagaaaaatatgccatcaatgaaagtgatgagccagaaggaatcttgctgcgaagccaaaagctgcatgactatccttttccaaaaagtgtattagggattgcgcgagctggagctggtacgaacaatattccggtcaaagaatgtacagaacaaggcatcgtcgtcttcaataccccaggagctaatgcaaatgcagtcaaagagttggttattgcaagcttgttattaagtgttcgcccgattctccaaggtgctcaatgggtccaaacactgaacggatcagatgtagaggaacaggcagaagccaacaaaaagcaattcgccggtacggaactagaaggcaaaaagcttggtgtggttgggttaggctcgattggtgccatggtcgctaacgatgcctaccgcttagggatggaagttgtgggctatgatccttatgtttcggtggacacagcgtggaccatctcccgcagagtcaaacgggccaatgatttagcagaaattttcacaacctgtgatttcattactcttcacgtgccattgatggaaaacacccgccatttagtgggcaagaatgaattggccaaaatgaagccaacggctaaactgtttaacttttctcgtagtgagatcgttgatacagctgcagctcttgctgcgttagataataatgagattgctggttatacaactgattttgcagatgaacgcttactgggccatgacaacgtgctagttctaccgcatttaggagcatcgacagaagaggctgagatcaattgtgccaaaatggctgcccgcacattgaagaaatttttggagtttgggacgatcaaacgctcagtgaattttccaaccgtagaaatggcgttccattcgccgtatcgtttaacagtgattaaccgcaacgtgccaaatatgctaggacaaatttcctcgatcatcgctgaatctggaatcaacatcgataatatgttgaatcgcggacgtgacgactatgcctacacattggtggatgtcggagcaacagatgctgcattgcttgaagcggtggcagataaattacgagctaaagaagatattattcgcgtgcgagtgatcaagaatcaggaggtaggctattaatggttcaagtttttccttttaaagcaatccgcccacaaactgacttagcagagaaaattgcggagttgccctatgatgtagtcaacacgcaagaagcagcggcatatgctgccggcaacccttacagctattttcatatcgatcgctcagaaatcgatctgccaaatattgctccttatgatccgcaagtgtatgcgaaagcagcagaaaatttggctgcttttcgagaaaaaaaatggctgatccaagacaatgcaccgtcctattatttatatgagctgacaatggcggggcggagtcaaactgggcttgttgtttgcacatcgattgaggattatgtagctggtaaaatcaaaaaacatgagtttactcgaccagaaaaagaagttgaccgcatcaatcacatccaagcttgtgatgcaaacacgagtccaatctttctaagttaccgtcagcctgagtccttaaaaaaaacgatccaggattggcagagtcaccatcaaccgatctatgatttcacgagttaccatgaggtccatcatcgggtttggctgatcgatgattctgcggtgattgctgctttatcacaagaattctcagcgattgatgcgttgtatatcgctgacggccatcatcgtaccgagtcggcagtgaaagtcggcttgcaaaagcgcaaggaaaaaaacaatagtgaggaaagcgagcgcttcttagcgattttgtttccggaaaatgaattggcgatctgggaatacaaccgagtggtcaatgtaccgattccagatcatttcttcgatcatctagcagagaaatttcacattgagaagccaactagcagcaagccttctcaaaagggaaccttctatttgtatttgggccacgaatggttctctttaaccatcaaagaagcagggaatgacgcagtcgaaagtctggatgtttctcttttgcaaaaaaatatcttagcgccattactcggtattgaagatgtccgcacagataagcgcatcgattttgtaggaggaattcgtggtccagaagaattggaacggatggtggattccggagaatggacaatggcctttttgatgtatccaacgcagatgaaagatttattggctgttgccgatgcgaatgagatcatgccgcctaaatctacatggtttgaacccaaattgttaagtggtctgtttttacatgatttagaaaccaaaagctagaaagctaaaaagaaaaaagccgcacgtctgcagagaaaactgcgatcgtgcggcttttttctttttttaaaaaataccagacattgtttcgatgatcaagcgaatgttgaggactgttaatgcgatggcgcaaatccagcccagagaagtgacccacagagggttcttgaacttttcgcccatgatttttttggaactagtaaagtaaaccaatggaatcattgagactggtaatgcaatactcaaaaagacctgtgaatagatcaaaagattatctagtgcctgttcattaccgccaaagtagagggtacatagtaaaacaggtacgacagaaaggccacgagtgatcaatcgtcttgcccatgttggaatcttcatatggatgaagccttccatgacgacttgtcctgtcagtgttccagtgatagttgagttttgtccggaagccagtaatgctacggcaaaaagaacactaagggctggactagccaccgctcccgcgatcactgaattttgtaaggcatcatacagcgctgaaaaagtaccgacttcttcgctgtgaccgaagaacaatgcgctccctaaaatcagcaacagacaattaacgacaaaagcagccgaaagctgaatatttgaatcccatgtggcaaagcgaacagctgtagcgacttcttgcggattcgtccgatcaatctttcttgattgtgaaatcgacgaatgcaaatacaaattatggggcatgacggtcgcgccaacgatccctaatgccatggtcagctgtccagggttcaatacttgtttttggggaatgaagccttgaacaagtgccggaagatcaggttgggcaataatcacttcgtaaacaaaaacaagcagaatcaccaatattaaggtcattacgatggcttcgatttttcgaaagcctaatttcatcaagaaaagcagtaaaaagacatcgaaaatcgtcaaaaagacccctacaactaatggtagaccgaataatagattcaaagcaattgctccaccgattacttcggcgatatctgttgccatgatcgccaactcggtaataatccaaaggaaaaagcccagctttttactggtgtgtttacgggttgcttgtgcgaggtccatatgggtgacaatccctagtttagctgccatgtattggagcaacatcgcaatcagacttgaaatcaagatgacggatagcaggagataaccatattcggcaccacccccgattgaagtgatccagttaccaggatccatatacccaaccgcgactaacgctccgggaccagaaaaagctaaaagattacgccaaaaattcccatccttgggaatagctacggtattgtttatttcttccaagctaggtccatttgctgcctggatcaattttttttcttcattcattctgtcacatcctatctttttaggtgtacctaaaaacaatcttattgtattccttgtttatgaatttttcaagagaaaaacttctgaaagtttgcattaactaaaaaaacagatattagaaaaggacagatttcgtttgccaaggtgattggtgattgttggattgatcaatcctaatctaaaatagggaatgttgctctacatagaattgatgaatgaaggaaatctatttgatcccacttgtttagaaagaccgaaaattttcttaagaaacataaaaaaacaagaagcactcaaaattgatgattttgagtgcttcttgacgctggattgtatgtcgaggatgaatgaacttttatcaggatcttttttatattcttattatgtcaaaagaacaagaagagcagcctttagaatgttaataaccaagtttattaatcaaagaacagccaagaggctgcccactattgtgcgacgtgtatggctatcaataataaaaagtatcattgttttgtgttgttgctgataaaacactgtgtcagcgtgtctacaaattcatcgaaggtggttatggcacttaatttatgaatgttttgttcatctgtacaaatcatggccagatcatcaaaaatttcccgaaacacatgacggttatggtaattgatggaaatcaaaaaaaccaatgtgacacgattatttccccactggatcccctttggattgacggcaatcgcaacccccgtacgattggcattcattgtcagtgaatgtggaatagccactgaaccaaaggcagtagaagaaagttgctccctctcaattacttgtggataaaaggtctcgtccacgattccttcttctttcatttgaccacataattgtttgagcaattctgcggagttttgattttcagttgtatatgagaatcgctttttatcaacaagcgatagaaaggttttcacaaattgttcttttcgttttttttctttgatatcaaagatcttggcggtaatttgttgccgatcttcaagggtaaaaaaaggattaatgatcacgtatggggtagcgatcacttgcttcagtttaacagcagacacaatcagttctgtatctacatactgcaactctttttcactagtaagaatattctggatctcaaggtcatcagagaaatttttctgaagcttttccatcacctgaatattcatgttgtagtaatgaggcactagaatcgtgcagtttattttattcgtacgctgtttttgaatttctaacgcatagcctaaatgaaaagctatgtaggcaatttcgtcttcactaatcgtataaccgatttctttttgaatgacatgagaaacctggacggcacaatcatagatgagcggacattctttttttagtgtttctgtcattgggtttctacaagagtagccgttattgatccgatacagtaaattctttatatggagggcaaatcgaatgaagaactcaggttcattgccatcaataaagtataattcatccacttttgctagaatttttcttactaagtcaaggcagtttttgtccgtgaccttctctaactcatcaggtgaaatttgagtgaaattcacgctagttccattcgctgaaattaggatagctaaatcacgaatttcttctttgggaaaacgaataccgtaccgttccgctactttttccgcgattttttcggaaatttttagtactgtcggatggattgagtgaggcgcttgagcttctgcttcaggagactgaaaatttcctttcatacggtctacggcaattgctagatgaataactatatttgttaacgcataatcattcgtgaaaaaatcatagtctgaaaaaagttcggcaataatttccttgatataatcaaggtcaaaatctataaaactttcttgtagcttagtcatatcaacgaaatgattatccaattcggatagcaatgtctgatggattaattgtcttttcgctttttctgtcccaatcaactgtagtgtatctttggttagtctgacttcgatagccagttcagaacatttttttttaagtttttttgcatcactcaataatgtggactcgctgataaatagttcttctgctagatcataaacagatagagcttcctcggttgaaatcagtcgcaaaaggagataagcagttcgttcagtaggtgtttcagggacacttgtttctgtgttattgaaaaaagtgaccagattacttgctatcactcgatagcctttgtttgaagaaaggatcaaatcagattcattgtcttgaatatctgcgatatacgattttatcgtccgtttggataacccaaatttttccgctaattgagtggaggaaacccaattgtcttgctcatttagatagtgaagaagttttatatactttgctttcattggctgacaccctctctttcaccactgcagtgcaaaagaatatttgtttcaccgctgtagattgactatagtataactgtaattgatagcgctatcaatgaaaattgaattgggggagaaaaatcatgaaaaaattgaatgttttacttgtgtgtggatctggagccagctcaggttttatggctgctaatattcgcaaagctgctgctgaaaaaggattggacataaaaattactgctcgcggtgaaagtgagattgaaaactacattgacgacattgatgcgttaatggttggtccccatctggcgtatattttggatgaagtagaagaatttgttggtgatgcaccagtgaaagtgattttgatgaagcctgaatactatgccacattaaacggaaaacaagctttggatcacttgttggaagaggtacagtagctttcagaatggagggaataaaatgcaatccttaattaactggctggaaaacagctttacgcccaaaatgaataaaatcaatcataacgtttggatcgtgactcttaaagactcaatcatgcaggctttgccattaattttcttaggatcggtcttttgtatgctggcaattttaaatgattattttccaagtttacccaatttctggacgccatacggatggacgatggggatgatctcacttgtcatatcttttctgattcctttcaacttgatggagaaaaaaagactgcgtaagcaaagaatcaatgctggaatgtctggaatcatcttatttttgattattatttctccacaagtcattgctgacggagaacctggttttagtcatagtgcgcttggtgcagggggaatgtttattgcaattgttgcaggactattcgctggtatggtgttgaatttatttggaaagttttcttttttcagtgaggaatcggtgattcccgattttgtccgctcttggtttgatgctatgctgccaatcggtattgttgtccttaccggatggatcttcgttgatcttcttggctttgatgtctacaatgctgttctagccatctttatgccattacaaagtgtgattgagacgccatggggcttttcattgatgatgttgattgtttgtttcctctattcgttgggaatttcaacatgggtattaacgcctgttttaaatccagttttattgactgctattcaagcaaatattgacggaaaggcaatgaatttagtaactgatccaactatttattctgcttatctatggattggcggtatcggctgtacaatgcctcttgtttttatgttgatgcgctccaaatcaaaaaaattaaaagccttgggtacggcttcggttgctccgacgatttttaatatcaatgaaccgattgtttttggctgtattgcttggaatccactattgatggtcccgatgtggttacaagggttgatattgccattaattgtctggttatttacgaaagtcattgcttttgcacctattccaacagtcatgtttcaaatgtggtactgtccatttccgattgccacttggctaactaccggaacaatttcaggcattctgctaatgctgattgtttttgtcgtggcggcagcgatttggtatccattttttaaagcctatgaaaaacaagaatgcgaaagagaagctgctgaagcaactgaaagagtatagaaagataattgtgaaagaaggtcttagaatggtgaaagaacaaatcgttcaacatgccatgcagataattctacatgctggagatgccagaaagcattgtatggatgccttgaaagcgattgaatcatatgattttgcactggctgaagtggaaataaagcaagcaaatgaggagattgtacaggcacaccgcatacagacagatgcaattacggctgaaacatctggtgaagatggagagtattctgtgttgttcgcacatgcacaggatacattgatgactatttacagtgagataaatattgctaaacgcatgctggcaatttttaaagcctatgatcggcgcattgagcaattggagagtagactggaaagagaggaagaaaatgactaaaatacctgaaggttttccaaaagattttttatggggcggtgctattgcagctaatcaagctgaaggtgcgtgggatgtagacggaaaaggctggtgtgtggcagatattaatgagtttcttccagatgttgacttagaaaagaaatctaatatggaaataacgacagcttatatcaaagaagcaatgaacagtacagagcgaatttttccaaaacggtggggaattgatttctatcacacgtataaagatgacttgaaattgcttgctgaattagggctaaaaacatttcggacttctatcaactgggcaagaatttttccaaacggagatgagttggagccgaatgaagcgggtttgcagttttatgacgatttatttgatgaaataataaaaaatggtatggaaccaatgatcacaatgtctcactatgaaatgccacttcatttgacaacttcgtataaaggctggtattcaagagaagttattgatttctttgtccgttatggtcaagttctgctagatcgctatcatgacaaagtaaagaagtggatagtggttaatcaaatcaatttaattgtccatgaatcgttcaatcatcttggaattcctgaggatgcagtagaggatttgctttctgctaaatatcaaggagtacacaatgaaatggttgctagtgcattgattacaaaatatgcgcatgcacattatccagataatgagatcggcatgatgctttgtggcggtccatcttatgccgcatctagcaaggcggaagatgttctagctgcattaaaattaaatcaaatggagtatttctttgcagacgtcttacttcgcggccgctatcctggttatgctttccgttactttgatgataaaggcattcatgtaacttttggagaagatgacgaagaagcactgaagcatacggcagactttatgtctttttcttactactatacacaaatatgcgatcaagactcttacgataaggatttaggaccacacagaaataaggaactaccagcaaatccttgggggtggacaattgatcccattggcttgagaattcttttaaatgagttttatgatcgctatcagtgtccaatttatatcactgaaaatgggattggctattttgataaattggaaaatgggagcattcatgattcctatcgtatagagtattatcgagatcatattcgagccatgaaagaagcaatcaaagatggtgtggatctgcgcggttactatgcttggggacccattgatatagtcagctgttcgtctagtgaaatgagcaaacgctatggatttatttatgtagatagtgatgattatggaaaaggcagtggcgaaagaatcaaaaaagatagctttgcttggtatcaaagagttatccgcagtaatggagaaatcattgactaagattaaagagagttaaagagaatagaagataagtgctggctgctctagctgaatgctttcttttagtggaagcagaccatccacaaactcaaaggagcagtcctctataacccggattttcaggttacaaaagagcttatcgcaggcataaaacaaaaagtactcgaaaatgacttttcgagtactttttgttttgctgagagcaccattaactgacagctgcaatgctctctttagctgtgactagttagaaagaattaatctgcccgcaaagcgatcgcagcatctttttttgctgccatccgtgctgggatatggccgccgatcatggttaggatcgtgctgaccagaattaagatcaatccatggactggattcagttgtgcaacattttccagatcagtcatattgtataagaccgcgttgattgggaaagtagctaaccaagcaatcaagacacctaatgcaccagaagcaatcccaaggatacatgtttcagcatcgaagacacgagtgatatcttttttacgcgcacctaaagcttttaggacgccgatttctttcgtacgttccaaaactgaagtataggtgatgataccgatcataatcatgctcgtcactaatgagatagcggcaaaagcaatcagaacataagtgatggcatccatcaagccgccggtcaattgcgtcatggttccagctaaatcagaataaacgatttgatctttacgatctttgcctttgttgtaagcatcaagatagtccaagattttttctttggaactaaaatcatttggatagatcataatactgtttggcaagtcgctgccacctaagtaatcgattagagaatcgcgcgtgctagcatcgattttttcgttggtcataacattgatatcactgtctttttgggctttgacgattgccgagtttttgttttctttgataacttcttgggctaatgcatcgctataagcgatcccggtagaaagcaaattcatcgtagatttttctttgatacgtaaaatcccgctgatttttaattctttatttgcactgttgtcataaacagctgttaaatcttgatttgggataaagttcccagttggcaattcagtataaaaggcatcgttaagtgccaacttgactgttgttcctacgatatcatcgaaagacactttatcgccgtctttgatatcaaatcctaagttgatcaatgcgttgacgttcgtcacgttgttctcgtcaacgatcagtacaacgtcatttgctgatgcaggatattctccctgcagcaaatcatagttgtctttcaggaagttgccgttttcctcagatagttgttctgggaaggttgaaacgccgattcccgtcgaagcactcattgcggacatcatggcatttgtctgctcgttatcagctgaagcatttgaaaagctgacttgttctactttatcatcgaccttacgcagtaagttcaacgaagtcgaacgagtgtagccaatgttgttgcttaactcaggatcaattttattgagatagtcaagaaagtcctgatcaatattattgatatgggttgcccggtcagcgtcactcagttttgcggtcacttctttagtggacgggaaattctcttctttagtacgagtactgattgcagaagggtcttgttccgtcgttactttagagatcgtgatcgggaaacgggccaatgtttcagactgtgtattatcgatttgcttttggaatccggtcgataaagacaagacgatggcaatgccgatgatcccaatgcttgaagcaaatgccgttaagaaagttctgcctttttttgtccggatattattgaaagaaagacgcaatgcagtgaggaaactcatcttcgtgtgctttaattcaaattgatctttcttttgttcttcaatatgcgggttagaatcttttaagattcgaccatccttgaactcaatgattcgatccgcatactgattcgctagttccgggttatgggtaaccatgattacgagcttttcattggaaagctcttggatcagcttcatgatttggacgctagtctctgaatccaacgcacccgtcggttcatcacaaagcagaatatctgggtcgttggctaatgctcgggcaatcgctacccgctgcatttgcccaccagaaagttgatttggctttttgtgcatatggtccgcaagaccaacccgtgtcagcgcatcttcggctttcgctcgtttgacttcttttgaaacaccgcttagtgtcattcctagctcaacgttatcaataatccccaaatgactgattaaattgtaactttggaacacaaaaccgatcgaattgttccgataggcatcccaatcacggtccttgaaagatttggtcgattttccattaatgaccatgtctccagagtcgtagttgtctaatccaccgatcacatttagcatggtggtttttccagagccgcttggtcccaaaatggctacaaactcttgttttcggaaagcaaccgagacaccgtccaatgctttggtggtacttgatcctactttataatacttcttgatatcttttaattctagcatgctgtcactcttttcttgccattttcatgtttttttcatcctgtttaaaagctatcataacagttaacaaaaatcaacaatcgttattgttttgcagaagttcttatactaaactatagagaagaaaagagggagaaaatgacaaaagcgatagagaagtttgatatatcagtatttgcagaagttttctcactactgggaaaccttttgtttgaagaagttgggtttgaagatttaaaattgacaaagatggaaatacttgaattggttatcatcgcagctaatgaagggatgacgatgtcggaattagcaagacaaatcggcacatcgaaggtccagattagtcgttcgattgctggattggaaaaagctgggtttgtcattcgcaaaaccaatgaaacgaatcggcgcagcgtcaatgtctttatgtgtgaagcgggaagagaattgtttagtcgcaaaaaacaacaaattgaggatcgcttgaatgagaaggtttcggcaatgcgcccttcggattttacagagctttatcaggcgctgactacagtgattggtttgttgcggaagtatgacattttaaaagaacacgcttgctcgaacaattctaaaccaagtaaatgatccccaatttatagcaatgcaaacgattgcttcgtttgtgttatttgatgtttctattatatttctcgcccttttgtaaaaagaagaggataaagcaatcgattgcatattttgcttgtattctcttcttgtgtgtgggaaaatagaggcaacaaataattaaaggagtctgctatgaatactactgctatttatcatcgtccagaaagtgaatttgcttatttatttgaaaaagacaaaatgcacattcggctgcgcacagctcgtcaagatgtgcgtcacgtgcaattattatgcggggatccgtataccttatacaaagaagcttggtaccaacgaaggatcgaaatggataaaatcttgtctacggacttgcatgattattggcaagtgactgtaagtgcagaatttcgccgattgtcttacggcttctcaattgaaagttttgacggtctccatgttttttatggggatcatggggtctatccttttgaagagcaatacttagaaatgaacaacaattatttccggatgccttactttcaagaagcggatcggttcaaagtgccggaatgggtcaaagaaaccgtctggtatcaaatttttccggagcgctttgccaatggcgatccatcgaatgatcctgaaggcacattgccctgggggtccaaaaatcctgatcggcaagatttttttggtggagatttacaaggtgtgatcgaccatctggattatctcgtttcgctagggatcaatgggatatatttctgtccgatttttgaagcctactccaaccacaaatacgataccatcgactatttagcgattgatccggcatttggggataacgagacctttaaacggttggtggaggaatgtcataaacgaggaatcaaggtcatgcttgacgcagttttcaatcacataggagatacttcccaccaatggctcgatgtcattaagaatggtgcagattctccctttgccgattggttccatatcaatgaattccctgtcaattataaagaaggcgaagattttgaagatgcttatgatatcacgtatgatgtgtttgcatttaccccgcatatgccgaagctgaatacagagaatccggatgttcaagactatctcctgaaaattgctcgttactggatcgaagaatttgatatcgatgcttggcgcttggatgtagccaatgaggtgagccataatttctggaagaaatttcgtcaggtctgtgatgaagccaaagacgatttttatattttaggagagatatggcattcttctcaaagatggctccaaggggacgaattccatgcagtcatgaactatgcttttacggatgcaatcattgaatacttcgtcaaaggcgaaatatcaatgacaaagatggtctcggaactaaataatcaattgatgctttatcgggaccagacaaatcaagtccaattcaatattttggattctcacgatacgccgcgtctattgacattggcacgaggcgataaggacctgatgcggcaggtgatggcttttacctacttgcagcaaggggttccctgcctgtattatggcgatgaaatcggcttgaccggggatatggatccggattgccggaaatgtatggtttgggaagaagaaaaacaagaccgcgatttgttgcgcttcacaactgatttgattcatttgcgcaagagtcatcaaaaaatcctttcagagggctctttgaattggaacgtgatttctgaagaagaaggattgatcatttttgagcgggaattaggtgcgcaacgaatcattggaatctttaataccggggaagaccaactcacattgtcttgcccagaggaaattttattagatcagtttatgcagatcgaagatgagacaatgatcattgataataaaggatttgtcattgcaaaaatcaacaatgaaatcagcaataattaaaaaataaaatgaggcaagatctgttaaaacaggtcttgcctcatttaggctgattgggttttatttccccatgcacgttggaaagaatcttccccaaaattctttctactaatattatagcctataacccgtagatgtgacaaataataacagtcgaaaaataacccttttttgaaaaaaagcgaaagaagagggaattttcagattttttctttttctttctgagaatgcttatgtaaggtcttttctttttgcttaaatatgataaactagtaaaaatgtatttttattcgaggagtgatcaaatggatagagggtaccgggtagctgttgttggtgcgactggcgcagttggaacaaaaatgattgagatgttagaaaagactacattgccgatcaaggaattgattctattggcttcaaagcgatcagctgggaaaacctgtgtcttcaaaggagccactttggtcattcaagaattaactacgacctcatttattggagtagatttggctttatttagtgctggcggcagtatctccaagcaatttgccccagaagcggttaaaagcggtgcggtcgtaatcgacaatacgagctacttccgaatggatccgaatgtccctttagtggttcccgaagtaaatgctcatgctttagcaaaacaccaagggattatcgcaaacccaaattgttcaacgattcagatgatggtggcattagaaccgattcggcaacacgcaggtttatcgcggatcattgtttcgacgtatcaagctgtttcaggtgccggtgctaaggcaatggcagaattgacacgggaatctcaagcttacttgtcaggaacaccagctgatcagttggcaccagagatcatgccagcgggcggtgacaagaaacactatcccatcgcattcaatgccttgccgcagatcgatgtttttgcggaagatgattacacctatgaagagtggaaaatgattaatgaaaccaaaaagatcatggaagactcagcgatccaagtagcggctacttgtgttcggatcccagtctttagcgggcactcagaatctatttatatcgaaacaaaacaacctgcggaattgactgcagtcaaagagtggatcaaagcagctcccggagcagttctgcaagacgatccaagtcagcagatttatccacaagcactgacgagtgtcggtaagacagagaccttcgtcggtcggattcgaaaagatttagatgtagcgaatggtctgcacctttgggtggtagcggacaacttgctgaaaggtgctgcctggaactctatccaaatcgcagaatcgctgcatgaacagtctctagttcgagtgtaaatcataagtttttcagaaaagtgtagcgaatgccacgcttttcttttttttgttgtataatgaaagagacggcttaggctagggaaataaatagtgtaaaaaaatcaagaggtgaatagattggaaactatcaaaatcattcctctcggtggtgtacgtgaaaacggaaaaaatatgtacattgctgaagttggagaggatatatttgttctggattgcggtgtccgttatccagaaaacgagttattgggaatcgatacggtcattcctgatttcacgtatctagaagaaaacgcagatcgcgtagcgggggtctttttgactcatggacatgccgacgccattggggcgctgccctatttcttggagaatgttccagttccggtgtttggaacagagctaacgatcgaattggcaaaattgaccgtagcaaaaaacgaagcaacaaagaaattcaaagatttccatatcattgatgaacattcagaaatcgattttggtcatgcaaccatcagctttttccggacaacgcattcgattcctgattctgtcggaatcagcgtcaaaaccagcgctggaaatatcgtctatacaggggatttcaaatttgatcaaacagctatcccaatgtatcaaacggatttcggacgtttggcagagatcggtaaagaaggcgttctggcattgctgagcacctcaacaaatgcagaaaacccagcaccgattgcttctgaattgacgattcaagatgaagtgtttgacaacattcgctattgggaaggtcggatcattgtcgcaagtgtagccagcaatctgcagagggttcaacaagtgctggatgcagcatatcgttccggacgaaaagtagttttgactggtcaggactttggacggatcatccgcactgcgatgaagttgggtaaactaaaattaccagcagaggatttgctgatcacccaaaaagaaatgaaaaagtatgccaatgagcaattgcttattctagagactggccgtatgggtgaaccgatcaaagcattgcagaaaatggcgaacggaacacatcgtacattacggattcaagaaggggatctcgtttatattacgacgacgcctacgacagctatggaaacggtcgttgccaaaacggaagatatcatttaccgagcgggtggaaccgtgaagcaaatttcagataattttcgtgtttccggtcatgcgaatccgaatgatctgcaattgatgctgaatttaatgaagccaacgtatttcctaccaatccaaggagaatatcgtcagttggcagcacatgtggacttggctcatgaagtgggcattccgttgaagaatattttcattaccgcacgcggggatgttttagaatacaaaaaaggcgaaatgcattcagctggtgctgtaccagctgagaatgtcatgatcgatgggatcggtgtcggtgatatcggcaatattgttttacgcgatcgtaaagtcttatctgaagacggtattttcgtcgcagtcgtaacgatcaaccgtcgcgaaaagaaaatcattgcagcaccgcaaatcacttcccgcggctttgtttatgtcaaagcaagtcgtgatttgattcgggaaagtggtgagatcgttgcagagatcgttgaaaaacatttgcatgatgaagagtttgaatggagtaaattgaaacaagacattcgagatcgcttaagccgcttcttgtttgaacagacaaaacgccgaccagtgatcttgcctgtgatcatggaatccagtcaaagaaatcgatcacgcaaataaaacatccagaaaactaggacgccagctacaaacgtcctagtttttgctttgatttttgtggtgtctctttagatacatagcgcagaaatacgagaacattgtccgatcgataatatctaggtcttcattgacagggtgttgtctaaagcaagtgttccaataaccaaacattgaaattgctcctgttttccggtgcggattggtggggtctctcaaggcgtgtcagttatttttgttagtctggctaatttgacttgtccgaatgctggagtgatgtctggataaaaaacaattccacgaagaaactcgtgttaaaagaaaattgattggatcgaaaggatggttttgagtgaaaagttatcaagaagatacgcttgtccagcagagaaaatggtggatcttgattgctgttgcgatgttcacgtttatgtctacattagacggcagcatcgtgaatattgcgttgccgacgatatcggcaaatatgtccgtacccatgaaccaagcggaatgggtcgtgtcggtttatttgatggtggtttgtgcttgtttgttgctatttggtaagattggcgatagttgggggaaaatcaaggtctttcgtctcggcatgttgatttttaccatcggttctttattgtgcgggttcaaccattcgttggcttttttgctctttgcacgagtcgtccaagcgatcggtgcaagtatgacgatggcaacaaatactggaatcattacggaagtatttcctattagtgagcgaggacgggcactggggatgatcggcgctttcgtgtcgctaggatcaattgctggtccaggactaggcgggatcatattgtctcatttttcatggccttatattttttggatcaatgttcctgtcggaattctgactatgattgccggggagaaaattttacccaaagatatcaccatgagccgcaactccatcgataaaagtggatttggtctattctctgtggcgatcttgacctttttcggtggaattttcattggtcaggagcaaggcttcttgacatggttgccattagtattgattttcgttgcaatcattgcttttattgcttttattcaagtagaaaaacgggtggcgatgccgctgattactttcagcattttccgaaataaaatttttacgttaagtttgtttacggcacttctgatcttttctgctaatttttttgttaatgtcgtgattccattttatctgcaaaatgcccgtgggttgactccaagtgtagccggaatgttgatgatggtctttcctttgatgatggttatcggatcgcctatcagcggttatttgacagaccaagtcggtccagaaatcttggtgttgattggcttggccttactatcgattacccaactgatgtacatgtttatgaaccagcatacacctatttggtattatgtggtggctacagcaatcatgggattaggaaattccttgttccaatcgccgaataataccatggtcatgagcagcgtgaccaaagaaaatttgggagtggccggtagcttgaactcttttgctcgtaatctaggcatggtgctagggattgcaatgtccacaacgattctatattctgcgatgagcagtgcctatggtcagcatgtgacgacatatatcaatggacgaccagatatcttcaattatggaatgaaagttactttcttcggtgcgtttcttttatgtgctgtggccctattgatgactatgtggcgtatcaaaaaacaaggtggcttccagaaacattctctgtaagctgcgaacctaaaaaaactgttctagttcttttttctgaagactagaacagtttttttgtgatttcttgactaagagaagaataacgtcatgaatgaaatggatacaccgaattgattgtttggaattttgtattagtctgttataatagaaaatattagtctgtattacttatgaataggaaaggggtaattgttgtgaagattacttttcatggacacgcggttctttcgatcgagttggaagatggacaaaagttgttgtttgacccttttataaatggaaacgctatgactgatctggatgcagaaacagttgatccagactggctgctgatcactcatgggcacagcgaccatgtaggagatatggtggcgattgccaaacgtacagaagcacctattatcagtgtagtggaagtttgtcagtatgcaacaagtaagggagtaacgaagactcacggtatgaatatcggcggctcatatacttttccctttggcaaggtacggttcgttcaagctcagcacagttccggtctggaagaagacggcaagatgatctatatgggaaacccagcgggaatcattttagaagcggaaggcaaaacaatatatcacgcgggggatacagccctctttggtgatatggcactgattggcgaacaatttgcgatcgatgtggctttcttgccgattggtgataacttcactatgggacctaaagatgcagccgcagctgcccacttattgaaagcaaaaaaagttgtaccagttcactacaacacattcccactgatcaaacaagatcccgccgcttttatcgacttgctgcctgagggagtaggcaccgttttggctgtgggagaatcgattgattgttgaccgtctgattgacggattttattaactaggagaaaattatggcgacgaaacatgacttgattttagcgcatatcgaaagtttgccggtaggagaccgtatttcagtacggggaatcgcaaaggatttaggtgtcagtgaaggaaccgcctatcgggcaatcaaagatgcagaaaatatcggtctggtctctaccattcaacgggtaggaaccattaggatcgagcgtaagttaaaaaaacatattgaaaaattgacctttggagaagtcgtacaaatcattgaaggagaggttctaggaggcgcagccggtctagataaggacttgaataagtttgttatcggtgcgatgaaagaatcagcaatggaacgatatatcaccccgggatcgctcgtgatcgtagggaatcgaaatgaagttcaccaattagcattagaagatggtgctgctgtcttgatcactggtgggtttgaaacatcagaagaaaactgtcgtttggccgataagctggaactgccaatattgcagacgacttatgatacgtttaccgttgcaacgatgatcaaccgggcattgagtgaccagctgatcaaaaaagatattatgctcgttagcgatatctatatgccgctggaaaaaacaaagtatctgcatacgtttgacactgtcaaagactataaacgtctttcagaagaaaccaatcattctcgctatccggtagttaacaagaacatgcgcgtggttgggatcattacggcaaaagatgttttggaaaaacccgatacgcaaatcattgaacgaatcatgactcgtgaaccgcgagtcgtgaaaaaagagatgagtgttgcttctgccagtcatcaaatgatttgggatggcttggaagtgatgccagtagtagcagatgacttatctttgatcggaatcgtgactcggcaagacattatgaaggcgatgcaactagtccaaagacagacccagatttccgatacgatctctgatcagatttctggtcagatccaaatcattgaacaagattttgaaggcaataaattggcacagccaaactttcgtttcgctgtgactccacaaatggtcaatgaagtaggaacgatttcttttggtgtgctcagtgaagtgatcgccaatgctgccaaacgaacgatgcaagtcaatcagcggcgaaacagctggatcgaacaagtgaatctacactatttccgcttgatccaattagaaagtgagatcattattcagcccaaaattttggagctggggcgccgatctgctaagatcgatattgaagtctatatcgaaaattccatggtagctaaagcaattgtcgtctgccaagtaatggagcgcccttaattcgaacagcagtcatcagataaatgcttagaaaatggagatatgcaatgaacgtacaagaggaaatattgacagcaattaaggaatatcagacaattattattcaccgccatcagcgacctgatccggatgcactagggtcacaagttggattggcagaaattttacgagctagttttcctgaaaaagcgatctatcaagtgggagggcctgttgaagggctagactacttagcagaaatgcaggagatttcggatgaagtctacaaaaatgccttagtgatcgtgaccgataccgccaattcaccaagagtcagtgatcagcgctatgccaatggtgcaaaattgatcaaaatcgatcaccatcctaatgacgaaccttatggagatttggtctgggtggatactactgctagcagctgcagtgaaatgattacggcattctggaaaatgttcgctgaagaacttactatgtcgcaagaagctgcgcgcctgctttatgccggaatcgtaggggatacgggtcgtttcctgtacccagcaacgacctccgcgacattgcgttacgcagctgatttgttggattatggttttgatgcaccaaaaatcaatcgtgagattgatcaggtttcgagagcagtggctcgtctttccggctatgtctttgaaaatttagaagttgattcactaggagctggcaaagtgattctgacaaatgagattcaacagcgttttggcgttgttgattcagaaacatctgctatcgtgtccttaccagggaagattgaagatgtcttagcatgggcaatttttgttgagcagccagaaggctattatcgggtccggatgcgttcgaaaggacctgtgatcaatgagatcgccaaacgtcatcatggtggcggacatccgcttgccagcggagcgaatgcagcggatctggaagaagtggcagccatctatcaagaaatccagaccgcagtttcagcttttcgagaacaagcatagactttattcgtcgtgatcagtgttcttttgcagaagaaaaaaccaacagcgaggaatcttaggacttgctaggggaatgatcggtgagtttttgattgtagtaaataactgtagtaaaaaattacgcaaataaaaaaagcgtatgactcgcgggtcatacgcttttttgcaagttgcaacaggcgagatcagccccgcaagtcgtcaagaaactcggttttactagccgtcttttcatctttcatcttgatgactttagccggggaaccagcaactacagcccctgccggtacatcttctgtgactacagatccagcagcaaccacagcaccttcaccgacacgaacaccttcaaggactacggcattggcgccgatcaacacatgatcttcgataatcactgggctagctgaaggtggctctaagacaccagctaaaacagccccagctccgatatgggcttttttaccgacagtagcccgggcgcctaaaatcgcccccatatcgatcattgtttcttcgccgacaacggcaccaatattgatgaccgctcccatcatgatgaccgcattcttctcaatgattgcttgatcacgaatgaaagcccctggttcgatccgagcatcgactgttgttaagtccaacagagggatcgcagaattccgacggtcattttctaaatagaaatcagtgattttatcttgattggccgttagaaaatcagctacttcttgactgtctccaacaataaagtaaaaggagccagccccaaaaattttcagtgtctcggaagaacaggtagatagatcaccattcaaatagactttgactggggtctgcttattggcttctttgatgtatttggctaattgataaggatcagaaaattgtaattcagtcatacgttaccacctttacttgtcaagtagattttccatgtcatatagtccagcaggttgttgtgcaagatattcggcagccttcaacgcaccattggcaaaaatatcccgtgataatgcggtatgtttcagctcaatgatctcgtctgctcctgcatagatcaccgtgtgttcgcccgggatcgtgccaccgcgaacagcgtgaatacctaattgttttcgatcattggtcagatcgttgccagaacggccataaagatattcttttggttcttgacaactttcattgatgctgtctgccagtaacaatgcagttccgcttggcgcatcgattttttgattgtgatgtttttcaatgatttcaatatcgaaatctgcttccaaaggtggggtgatcgcttttagggctttgatcaatacattgatccccacggacatattcgcagaataaaaaacaggaatcttttgagcagcggcgaccattttttcttgggttgcttgacttaaaccagtcgtagccacaacgatgggcagttggttggcaacacagaagtcaaggaggcctgctacattgctatgatgtgaaaaatcgatcaccaaatcaacaggttctttgactgcttctggtgcagaatagattggaaagtcgccagttgcttccgtgtgacggtctaatccagcactgatcacaaattcagcatgtccagcaatcatgtgctgcaaaacttttcccattcgaccattggcaccgctcaataaaatatgtctcacttgattgcctccttataaaagcccataagcggacatttctttttttagacggttgattgtttctttctcaggcggtcctaatggcaaccgatagtgcaagtcagactttcctaataaggaaactgccgctttgatgggcactggattgacttcactaaaaatcgcatcgatcaaaggtttttgtcgtaactgctcctgaatcgctgcttgaatatttccagaaagaaaatctgccaccaaagtcgctgtttgtttaggggcaatattaccgatcgtcgaaatcacaccagaaccgcctaatgctaagattggtgtgacttgatcatcattgccggaatagagagaaaattcatcatccactagttgcgcgatagacgcaatttgtgagatatctccactggcctctttgattcctttgacattcggaatctcttttaattcagcaaccatgtcgtaagtcaagttcattcctgttcttgatgcgaccgaatataagatgacaggcagttcaacgctttgacaaattgccttgtaatgagtaaccaaactcttttttgttgctttgttgtaataaggggttacaaccaataatgcgtcggcaccgacacgctctgcttcttgggaaagatggatcccatgttgcgtattgtttgaaccagtgccaccgatcacaggaatgcggcccgcagcctgcttgacaaccgcctcgataacagcaatgtgttcttcatcgttcaatgttgaggcttcaccggtcgttccacaagcgatcaatgcatcgctaccttgctggatatgccactcaaccagtgacttcaacttgtcgaaatccaccgaaccatcatgaaacatcggggtgatcaatgcaacgccagaacctttaaaaatcgtcaaactactccacatcctttcaacctttttattctttctctaattgtactaaaaatcaaaaaattttgattatttatactatagattattcgaattatatactataatattatccaatatcaatggaaatgtggatatccatacattttcagccgatattgctgatcaaatgaaagaaaggtgcccacgaatgcaattatctcaagcagtaatgaaattaaccgaagacgtggttcgttttcgacgggaactacataagattcccgagttaggattagaagaattcaaaacgaaggaatatttgcttaaacagttgcagtctttcgggatcaaagaaatttatccggttctggataccggattgatcgctgtttttcgcagtgaaaaaccagggaagacgttagcattccgcacggatatcgatgcattgcctatcaaggaagaaacgaatgctccttttgcctcgcaacatctcggcaaaatgcatgcttgtggacatgatggacatatggcgacgcttttaggttttgcaaagtacttatccgattacccggaagctgttcgcgggaccattgtgttgatttttcagccagcagaagaaggccctggtggtgcgcagctaatgattgatgaaggaatcttaaccgattttgcgattgatcagattatcggtctgcatgtttttccagactatcctgaaggtgtgattgcttgccgcaagggaccaatgatggctcgaaatggcgagatcacgattcgagtcctgggagaaagtgctcacggggcccaacctcatcaaggcagcgatgcgatcttagcggcagctgcggtcattcaaggtctccatgcaatcgtttctcgcaacattagtccattgtcttcggccgtcattacattcggcaagattcgcggaggagatgcagaaaatattattcccggagaagtcgtgttgaacggaacgatgcgggcttttgaagatggggtctatgaaacattgacgcaacgagtaaaattggcggctgaagagattgctaaagggtatggctgttcagcagaagtttctttcgaacacttgtatcgggtggtagacaatgatccagacatggtagatgctgttcgggatgttgctggcgacagttatatcgagacaccgccgtacatgttagcggaagatttctccatgtaccaaaaagagatccctggtgtctttttctttgtcgggactcgggatgaagaaaaagggtatacctatccgctgcacagcagcaagatgaattttgatgagaaagtcttattaggaggcattgagtgctacctgcgattgattgaaagattgaatcagagtcaggtactaagagaggagcgcagtaatgatcaaagagattaaagacaatcacctgttttgggatggatgcgatacagtggcattagcaaaagaatttggcacacccttgtacgttttttcggtgaccgagattcgcactcaatgtcgtgctattcgcgaggaatttctgtctcgctatgaaaacacccgagctgcctatgcttcgaaagccttcaatacactagccatgctgcggttgattgatgaggaaggcctgtctttggatgttgttagtggcggtgaactatacacagccatccaagcaggatttccagcggaacaaatcgaattcaatggcaacaataaatctattgatgaattggcattagcgatcgattatggtgtaggtcggatcattgtcgatggcagtcaggagatcggtttgattcgagcgctatgtcaagagaaacagcggaaagcaaaagtgatgttccgaatcacaccagaagtgaatgtccagacccatgcgtttatttcaactggacagaaagattcgaaatttgggatcccattggatgaagagattttatttcctttgattgaagaagtgattgacgcaccggaaatcgatttttatgggttgcatttccacatcggaagtcaattgtctgacaatcattcccatattgctgcgacagaggctgcgctagcattagttctagaaatccatcatcgatttgactatactgttaaagagttgaatgttggcggcggatttggtgtccgctatacggaaaaggatattcgtcaaccctattcttactttttggacccggtgatggcgacgattgaaacgttttgccaagcgcatcagctccaacgtccgactgtggtgatcgagcctgggcgtagtattgtagcggaagcaggtatcagtctgcatactattggtacgatcaagacattgccacagattcgaacctatgccagtattgatggcggcatgacagataacattcgtcccggtctttatcaagctgaatatacggggattctagccaatcgggcagcagaagctgccacagagacagttacgatttctggcaaggcttgtgaaagcacggatatcttagtcaaagatctgcaattacccaaagtagagacgggagatctttttgcgacttttgcgacgggagcatatggttattcaatggctagcaattacaataaacttgcgattccagcggtagtttttgttgaaaaggggcacgcggaattggtggttgaacgtcagactttccagcagttgattcaaaatgaacgtatcccttcgtttttgatgaaagaataaaaaaaagcaggtgaaatcatggaaatcgtttataccaagatgcaaggtgccggaaatgattttattgtgatcgacaatcgtcgctataatttttcttcgaaacagttggctaagttagcggctcaagtttgtcagcggaaattttcaatcggcgcagatgcgttgatggctgtcgatcatcccgaaggaacgggagatttccgcatgcgtttttataatgcggatggtacggaagcggaaatgtgtggcaatggtgcacgctgtatcgctcgctatgcttatgaaaataaggttgcttcagaagcaatggtgatcgagaccgttgcaggacctgttcctgcttggcgattggatcggcaacagtacaaagtgacgttaaatccccccaccgttgcgaagtttgaccaacctttcgctgacagagaggttcctgtcgttgattatatcgagttaggtgatccaggaatccctcatgcggtggtgaagtatcccggtctgcaagaaacatccctcgatgcattgacagatttagcacaacggattcgctattggtcagcatttcctaaaggcgccaatgtgaatttctacgatgccgattcagctggggagctcgttgtccgcacctatgaacggggagtcgagggctttacgtatgcttgtgggaccggctctggggcaactgcttatgcggtggcgcgacgccgggaacaaacgcaagccaatcttgtgctgcatgttttaggcggagagctgcgagtcgaagttgcatcagaggagctccaactgattggggatgcgatttttgtttctgaagggcgtattttagacgaaaatctatttttagactgagggtggtcttgcgacggaattatcctgttcatagaatcatttaggcgacagttcttatggaagccttattcttagaagccatctttagctagaactgagaagatcatcaaatgcaatcgatagaacttagtttgttctatcgattgcatttttttgtgcaggatattgcaggatagtcagaaattttgtatgctacagttatatttattttttcacgatcgtgctcgatcgttgaataaacacagaatacatcactatgaggagtaagaatatgtctcaaattccaaattgtccagtttgtcaatccgcctatgcatatgaggatcgcggcttgtttgtctgccctgaatgtggcaatgaatggcaggaaacagaagaaactgctgctgtcgtcaaagatgccaacggaaatgttcttcaggatggcgatgccgtgacggtcatcaaagatttgaaagtcaaaggtgcttctggtgccatcaaacaaggaaccaaagtcaaaaacattcgtctggtagaaggggatcacaatatcgactgtaaagtcgatggtttcggtgccatgaaattgaagtcagaatttgtaaaaaaactttaaaaacagaatcttccatacctcttcataatattttcatccatttaatggtaaaataaggtcaaagacgaaagggagggatttcatcgtgtatggaatcggtggatacggttttggttggttttatgatccaacattcattttggtcattatcgggatggtgatctcgatggcggcttcagcatacgttaaaagcacgtttagcaaatacgataaaataagcagtagaaacaatatcaccgggaccaaggcggctcagtatattttggaaagccaaggcatcaacaatgtcggcgtccaagctatcgcaggagatttgactgataattataattccggcaacaagatgctaagtctatctcaagcaactgcacaatcaacttctgtggcagcaatcggagtggcagcccatgaatgcgggcatgctgtgcaagatgctaaagggtatctcccattgcgtatccggcatgcgatcgtcccagtagctaatattggttccgcggtgtcgatcccgttgattttgatcggggttcttttgagagggtccttcctaatcaatctggggatattagcattctcgttagcatttattttccaattggtgacgttgccagtcgaatttgatgcttcaagacgagcgttacggattttagccgatggcggtctcttaacggaagaagaagtaccgcaggcccgtaaagtattgtttgctgcagccttgacttatgtggcagctgcagttgcgacattgctgcaattactacgtttgattattttattcggcaataacaatcgccgcgactaatgaaaagaaggagacttgagaatgctcaagtttcctttttttgaaattgtcgttataataaaaagaaaaaggtggggaataaatgaaaaaagaaacatggctgcggtcgctttttgcgttgatcggggtagctatcatcggttttggcgcctccttgcttcgcgtaggtggcgtcgggctggatccgtatacagctgccaatattggaacaggtgaacggttaggtctttcattaggtgtttatcaattaatgatcaatctcgttttgttgatcttgattttcttttttggtcgtcggcatattgggatcggcacagtgatcaatatggtcttgacgggcttttttattgatttttatacgaaaatctttgaacttttcgcagtttctccggaaggttggctgcaaaaagggctctttttagtgatcggtattctgttctttacctttggtgcttccttctatatgtcagcaaaagtgggaagtgcgccttatgatgcgatcgcaccgacaatcgttgatcgaacgaaagcgaattatcgggtcgtcagagtgatccaagatgtggcttttgcgacactcggctggatcacaggtggaccgatcgggattgggacatttatcagtgcctttctagttggtccgctgatcaagttctgggatgattacgcctcagtgccgttcatcgaaaagaccatcaagaaatctttatttaaatgagcgcggacctatcgaaacaacaatgataagtagcagatgatagataccagcagtacaaaaaaacactgtagatatgctattgatcgatttcaacgatacctacagcaataacgaaagactgtgacaaaatcagcagtgaatgggcaatggatagcgtaaatcgttttcgaacgaacgatcctttgctgacctattttaggtttgatttccttctgttgatttttgtcacatttttttcaaaattgcctgacgctacttgcacaatcgctgagcactcgctatgataagagagcttaggagggatcatcttgaaattaccagcagcattcattaccaaatatcagcagttactaggagccgaagcggcggccttttttactgctttagaaacagggcatccagtaaaaggatttcgcttgaatccgttgaagccacaagccgtctcgatgctggaaatgtttggaccggataaaagtccagcaccatacgcaatgaacgcctatattggagaagtcaaagggaaatcactgcttcatcaagcggggtatgtctacagtcaggaaccaagcgcgatgatcgttgcgacgatcgcagatgcacaaccaggagaaaaagtgctcgatctttgtgcagcgcctggagggaaaaccacgcaattagcaagtcagatgcaaggcaaaggtttattggtttccaatgagatttttactaaacgcgcaaaaatcttatcggaaaacgttgaacgatgggggatcagtaatgtggtggtgacgaaccatgcgccgcaagaactgacgccgcattttccacaattttttgacaaaatcgtggtggatgctccttgctcaggagaaggaatgttccgcaaagatcctgtggccatcgcggaatggcaagctgattcgccactgcagtgcgctcagcgccagaaggagattttggctgaagcggttgcgatgttaaagcctggcggacagttgatctactctacttgcacgtttgcacctgaagaaaatgaagccatcattgaatggctggtctcagcatatcctttttccattgaaccgattgaattggaaaatgtgtctcatggacgccacgattgggcaccgatgaacgacattgaaaagacgattcggttatggcctcacaaaaatcaaggggaaggtcattttgccgcaaagctgacctatcttggatcggagaacatagccaaaccaaagaaaaccaaaaaaaccaaaaaagcttctgggattgattctgtcacgcgatcactttggcaatctttccaagaaaactatccatttttaaaagagactgctgccgatatccagctttttggggatcatctgtggttagtacctagtgaattaccatcactaaaaggggttcgcgtattacgtccagggcttcacgtagggactgtgaaaaagaatcgtatcgaaccgagttttgcattggcaatggcgatcaaagaaaatgatgaagcacctttcttgtcaattgagttagctcagtggcagaagtacgtggctggtgaaacgattacggtacctggaaatgaaggctgggtcgtcttgaaggtggctgaggtcccgattggcttcggcaaacaagtgcaaggtgtggtgaaaaacttcttcccgaaaggattgcggttcactctggaataaacgaaatagtatttttatttgatcggtcgtgctatcatagaagtagcaaataaagggagctgatcgatatgaaaacatcaacaaaagtaacgattggattaagtattgcggcaattgctggcatctcaacagcagtcgttgtctcagacaaagtcgtgaacaaagtacgcttcgcttgcaaccgtcacaaagtgaaaaagtttgttgacgacaaatttaatggcaacgaaaaattattaggtgtcgtcgatgatttgacggataaagatttagatgcattgctcggcgtcatgaagaaagtcaaagacagccgtcataaagtctcggtttatggagataacgtcaaagatgcaacagagaatgtcaaagacaagttaactagctttattgatgcagtcttttaagctaatatctccttggagaaaatgctgttagaagcggccagaagatcgttgaaagaacctgccagtggttgtcctgccatagcagttgtttgactaggcttcatttggcgcttcttttttgttcagagaaaaggaaaataggaattgggagccatagcaactggaacaggtacggctactgaatgactgcgttaaaaaattgccagagcttttctatagagtcagtgtcagctttccatgtttatcccaattgagaattgaaaggaatcattttgaagaaagaaagtaccctcacacaaagtgaaaaagaatattttatgcgtgaagcactgaaagaagcgcaaaaagcggaagcaatcgccgaagtccccatcggggcagttgtcgtcttagaggggcaaattattggccgaggacacaacttgcgggaaaaacagcaagaggcaacagctcatgccgaaatgtttgccatccaacaagcctgccaagccatcgaaagctggcgcttagaacaagcgcagctatttgttacattggagccttgtcctatgtgtagtggtgcaatgatgctggctcgtgtcgaagaagtttactttggcgcctacgatccaaaaggcggtgctgccggttctttgctgaatctgttggaagatgagcgtttcaaccattggtcctacgtagaaggcgggatcttggaagaagcgtgcgggcaagtgctaaaagatttttttcgggcattgcgccaaaagaaaaaacaaaaaaagtctggtaatctatagaaaaatacgttatactaaattttgccgaaaggctaggacaatggaggtcttgtgaagcgtgtcagatccggaaggaagcagcactaagcaggagtctccatgtgtctgattgaatccctattagatagccttttggaagacctattttgaatagataacaggtcaaggggcaaaaaaggggcagaattgaaaatttaataatttaaaccataacctagtgattagaatcctaggttatttaatttttctacaatatcggttttttgtttttcagttacatgagtataaattttcaatgtagttttttcatcgtcatggcctactctttgcattatagcttttatgggtatgttcaattcagataataaagaaatgtggctatgcctaaaaatgtgagaatgcagctttttgtttatttttttatccccaagcttctcattattataatctagagcggcattgaatgtattcacttggattggtaatcccgttttgcctataaaaatgtagctgtcgttatcataatgatcatacttcaatttattttctaaaataacttcatccaaaatttcaataactcgattagatattcctattgttctataagatgcatcagtttttggcaattcttttgttgcattcttatagccttttgagtaatctaatgtgccgtgaatatctaggagcttctcttcttttctataattctttacttgtaaacttattgcttcaccaattctaacacctgttaagtacataaactctactagatttcccattcttttagattgatgagacgaatagtatgctgttaataatcgattaacttcttctttttcaaggtacaaatcttggactctagagaatgtttcaagcgttttaggtggtttaggtataattaccttcctcaatggattatcttttacatactgcatatttacagcgtaatcgaaagccatatttaagactgatttgtattttgatttttgaacgtgtgaaaaagtcagtgagttaataaacttttgaaaaaattgactatctgtatttcttatttttgctttcaaattaagattatcattcttcttaaaagacttcataatgtttgtataattacgaatagtatttgatcgtacagtttgagaatgaaaatcccaccattcatccagaagctcttgcaatgtgtggtctgattttttttccgcagttagtatcctgtcgattttttcgtttaattctttttgtgcttgctttttggctacatttgatttgctagttaatgtaatacttactttttttagttcttcagtataagggtctttgtatctttcgatatatttatatttacctttagctaattcctctatccacatattcatcatctcctatttatgataaaataggcacaacaaaataagctatgcctttttagctaatgcactcttactttcgacggtggggtgcatttttttatagctgtacaatataaaccacaacttttccatatattcttaattcttttgcatcctcgtaacttaccactatatctgtgaaggcgatattactggaatcaggtctaaaaataattctctgattttctttatcgttaatgaatctctttactgaaaactcattatcattactaaaaacaacaatatcctcgttcttcaactctgaaaagtcatctatgcgttttactgcaataagtgatccgttaggaatcacattgttcattgaatctccatttgtttttgtaaaaaatatatctgtcattccagaatatttccccatagcgtaatcaggaatagctatttgctcaatgtgatcttcctcaaaggcttcaatagatgttggaaggcctgctgcaatgctagtatcgaaaaaattatagtcatgtgtatcgtgataaaaagctgttatattgtttcctctgtcagtattcatacgacttaaattcatgcccgctttattagctttattgctaagctcaagaaatttttcgaattgttcctcttgagaactacttttcgaattaagtaactcgtcaaaaacttctttcttcatgtcgtgtaaatcgtaatttcgcgaatacctcggatcaatatctgctttatccacattgaaagctgcagctattgcttcggcattttctttgtttattgttgatttttctataaaatatccagaaagtgttgaggttggaattccagttttctcagatacctgggcgcgagtatagccatgagtgattcttttcaagttttctgcgatgattcgtcggatttctttatcttcttgagaaagtggttttcttgccatgttattttgacctcctttttttgttaataatatcgtataaaatcggataaaacaagtataaacgcgtacaataactatgttttttaataaaaaaacaagacaaatacgttgacaactcgtataaactcgtattatagttgtatcacaagagaggagttgaaaaaaagatggttttcaaaattactttagaagcagcgagagttatggccgatttgtcaattagagaagctgcaaaaagctttggtgtgcaccccgaaacgttatctcgttgggagaaagacccatcgaaaatgaaacaaagggatgtaaagaaaattgctgaaatttatggtatccctgtagaaaatattttttttggttctaaaaacgagtttatactactaaataaagagaacggacttttttctttaaataacaaatgaataaaggaagtgtcatggagatggaaatttccaaggttaatgtgattaacgttgttcaaaaatttgccaacaaagaacaagcaatggaatatttcggatttgctaagaaaagtacagctacttttcagagatatttagcagaattcaaacaacataaagatttcgggtccggatatattaacccaactggtggatatgtattgattgacattgataaatttgaacagttcttgagatggaaagacgcgaataaatttcgaggtgatagttgatgaagtattcactagaccaagagttactcattaacaatctcataaaagaaaagattcaagatttgcaccgactcttgcatgataagaaaaatgtggtaagtgatcgacagcaagaaaatgctagaaaggaacttaagcagtatcaagaactactttatcaaaatagattgaatcggcaaatagatttgaggtgagagaaatggaagaaatcaaaggaatagaaaaaaatgagagtgaagatttgttagaaatgtatgaatctgccttttcgggatccgaacaacagctatctttagcagctgtagggacctttaatcgattgattgatcaattcgaaaaagaggaaatccgcacaattgcagaaatcctcaaagctttagctacagccccaactgttttgcagcgttaattttatctttaaccgaaggttgttttttcttccgctcgtcatttacttgcctaatttttgaatcggcaagcgaataagctgcttcgtataattcaaatttctcttggattgtcaaatttggattagaggaagaaacaacagctaaagcaaactcttttgcatcaacaaacaaataatcatctccttttgattatttcagccgaccactgactgataaggagattatacaacagaaaggaaaatttaaaatgaacaacttagtagtcatgaaagatcagcaagcagtaacaacaagtttacaagtagcggaaacttttggaaaaagacacgaccacattcttcgagatattgaaggggtgaaaaaagatgtccccaaaattggggagatctttgtagaaggcaacgaaccggattcttatggtcgagatcgccgtgttgtttatatgaatcgtgacggattcactctgctagcgatgggattcactggtaaaaaggcgcttcagttcaaactgcaatatattgaagcattcaacaaaatggaagatcacatcaagaagcaacagcagttaccaacatcaccacgcgaattggcaaaactggctttagctgctaacgaagaaacaaatcagcgtattgatgacatcaacgggcgtttagtagatatcgaagaaaacaaactgatcactactgaagataaagggactattgatcgagcggttcaaaagaaagtctacgaaatatgcaggaatcaacatcttggccaaggtgctaaaagcatgctgtttcaagacttaggttcaagtatcaaacaattgtttggagttccgaatcgtggtcgtatcaaggacaaggacttctcaagagtattggggttcattgatcattggcagccgtcatcagtgacaaaagagcgtattaatcaaattcaaacagaattggaaatgtgaggaggtaattgctatggaatttgagaacgtcaaagatgcgctaaaaagcgcgatggagtatgccgaatcatcgagtattcaaatagacggaaagccagcaacatatgaggactttcaagaacttatgaaagagcatatctatgctattgcagacttgttgggtattgatgaagtgacggacaacaactggagcgttggataaaggagactgcaaatgaaaagtttacgtagatcagcattcattatcacggtatttttcttaggcgtttggttcggtaatcatcaccagttgccaagttgggcaatcatcgcattaccagtgtcaagtatgtggtggtttttcaaatatgacgagattgcttatagaagacggttaaggaggggagtacaaaatgctgatagaagaaaaacttcatcagttccaatgcaagagctgcaatagaaagaaaatcatcaacgctacagaattgaaaaaatgtgagccgtggaaaggtccctactgcacgaaatgcggcagacgtctcaaggaagtcaagaaattatatacaaaaaaatagcgactccgccggcaagcaaagagtcgcatacaaaacatatctggctacattgtagcacgagaggagaaattttcaaatgattactattactggacttaacgatgacatctatacagcaatgcttgggaatgctcaagagcgagtaattgataacatcatgactgctgccagtcaaggacgtacaagtattacgatcgcaagcaagggactaacacctgccttcttagctcaacttcagaacgaaggtgtggacaatctggtagaacaagacggacgttacaaattattttgggaattttaagaggtgattatatgaatgatttcgattcattaggcgctcgtcaacagcctgaaattgaaacaaatcaggtcgctgttgattggaaaggcgaaccactttacaaaggcgacatcgtctactcaactgatttagggctagttcacgaggaccaaatcatggactatgtaaacgaaaattacagaaaaattgaaatcggaggaatttagaaaatggctaacgaaatggcagttctacaaaaagatattaccgatgttgttttgggtaaagtaaccgaattagaagcacaaggggttcagctgccgagcaattacaatgctgcgaacgctttgaaacaggcattcttcaaaattaacgaagttcagttaagccgcaacgagggtggcggtttgtatatggaaaaatacggaaatacagcagtaggcaaagccagtattgccaattcattgcttgacatgattcaacagggattgaatcccggaaaaaatcaatgctatttcattgcttatggtcaaaagcttcaaatgtcacgctcttactttggaacacaagcggcattgaaaagacttgatgaaatcgaaaacgtaaaagcggaagtgattagaaaaggcgatgtttttagaattggttcagttgataacgaaacagtagtgacagagtttgaaccaagctttgaaaacatggataacgaaatcatcggggcttttgcaacgattacaaagtcagacggcacgaaggtttacacgattatgacgaaaaaacaaatcgataaatcgtggtcgaaggcgaaagttaaatcagtgcaaatcgactttccggaagaaatggcgaaaagaactgtaatcaatcgagcggcgaagcagttcatcaatacaagtgacgatgcagaactattttccgatgctttcaatcgaacaacagaaggcgactatgatcacgaaatcaaacaagccgaacctgtgaaggtacaagcgatcgaaaataaattacagcaaaagttaggcattaagcaatccgaaccaatcgaagaaaaaccgatcgaagaaccgactccgatcgaggatttgataaaaccgaaagaacaagcaatcgaaccagaaccgcttgaccttgatgaaaacgaacaagtggcaaacgatgtcgaaccaatccaagatgacctggggctgattccgaatttcggcagagaggaaggtgccaacgatgaaggaatcctcccagaagaagattacccgttctaagatcaagctcaatgatgataattactacggcaatgaagcggactggcaatacatgtcggtatctcaatacaaaaactttctcaaatgtcctgcggctgctttagccaaactaaaaggtgactggcaaccatcatctgatccaatcgctttattagttggaaactacgttcattcttattttgaggatctagctgttcatgaaaaatttaaggaagaaaataaaaacaggatgttttcttctcggaaaccttatggacttttgaaagatttcaagatcgctgaacagatgattgatcgattgattgtcgaagatgcgttcttgaatttatatcaaggcgaaaaagaagtgatcgtaaccggggaactatttggtgtcgagtggaaggggaaaattgattgcttaaatctcgaagatgactatttcgtagatatcaaaacaagtaaagatattcatgaaagaaaatggaatgaggtttacggtcaacgatgcaccttcattgagaattttgggtacgtcttgcagatggctgtttattgcgaattactcaaacaacaatacggaaaagatttcgttcctataatcgctgcagtttctaagcagacaccaagcgaagcgaagttgatcacgctggacgaggacaaaatgtcattcgagttaatcaacttaagagacaacatcgatcgtattcaacggataaaaatgggtgaagaaaaaccagatgcttgtggaacttgtgagtattgccgggcaaatcaacgaataaccggatttacaagtatgaacgacttgtaaggtggtgagtaaatgaccggaggatggataaagctttaccgccaattactcgaaaaaccaatatggcaagaatctacaccagagcaaaaagtcatattgatcacacttctttctatggcgaatcatgaggaaaaagaatgggaatggcaaggtgaaccttacaaagctaatcctggtcaattcgtcacatcactagaaagtatcaaaaggaaatgcggtaaagggatctctatgcagaatgtaaggactgctctaaagagattcgaaaaatacgaatttctaacaaacaaaccaacaaacaaaaataggcttataaccattgtcaattgggaggtttaccagtccaaggacgttgacctaacaaaggaagtcacaagcaactcacaagcaactaacaagcagctaacaactaacaagaactataagaatgataagaatgaaaagaatataaaagatattacgtcagggaaacgcaaaaagcgcgtttacccagacgacgaccctaataaaattcttgcaaaaactcttttcaaactaatcaaaaagaatcaagacatcaaagaaccgaacttggatgattgggcgaatacaattcgcctaacaatcgaatctgataaacgatcgggcaaggaagttcaagaaatgattgtctgggcaacgcaacatgaattttggagtggcgtgattttatcaccgtccagtttgagaaaacattacgacaagatgaaggctcagaaagaaaatcctattaagaaaagtatcggtcaacgtttgaaatcagaagaagactacgattacaacaaactgccgttttaatgaggtgaaatatggaaacgctaagtcaaggcattcagaaaatgatagcgcagaggctagaagttcgtggcaagtgtccaaactgtgaggggaatatgtacggatggaaagaaaagaaccctgatggttcagagcgttgttctccagtttgtatggcttgtggctactatgatatgcggcgcaaagaagacagagaaactgatcgaatttatcaagaaagcttgaagaaaaaaacaattgacttcttcaagttcggttcagttttgactgataaaagtttgttcgattgcacatttgataattataaacaaatggatgaggaaacaacttcagcagccaagatggcacaacggtttgtcgaatcggtactaaatggcgaaccgaaacacatggtactaggcggtaaatccggaagcggaaaaagccatttatctatggctgcaacgtgggcaattattgaacagtcggattacacgaaaaaatgcttgttcattagttatcgggaatttttagaacagattaaattttcttttaacgacaaagaacttcgcaaacaaattcaaggatcactcatgaaagacatcaaaacagccgatctggttgtggttgatgatctaggagccgagttgggtggaacaaaggcgggtgagagtacagcattcactaatgacataatcaactcaatttttgaagctcgtcagaaccaagcaacgatcattacaacgaacttggttgggaaagaaatggggaaggcgtatggccagcggatcacatcaagaatttttaagaactcagaggaatgttggttcctgttctctaaaacagcagataagcggctagaaagggtgtaaatatggtcaaagatatcaagagagcgaaatatggcaacagtaaggtgttagtagatggcattctctttgattcaaaagccgaagccagatactacaaaatcttgaaacaaaaagggatgagctttctaccaatatcagataatttttgcgaaatgcaaaaaaatatgatcttgcaagagggattttatagtgatggtttgaaggtagctccaatacattatcgagcggatttcgtcatttatgaagaaggcaagctggttaaggtagttgatgtcaaagggtatcaagatgcaatctcgatgttgaaaatgaagatgtttgctaaccgatacgggttcccagtgacattcgcaaagttcaattctaaaaccaatagattcgaggaaatgagttgctttgaatcagctcgtcagcaacgcaaaagagcaagcgatcgccgcaagagaaaattggagggaaccaaatgatggagagctctaaagaatggaatgttcaatttctggacgtaaatggcgatgtcaaatatcaaatcagccaaacctgtacagaatcgaaagcagtaacacttgctcggaagctagagcagatgtggcgaatacgaccggcaaacgatcggagtagtaagaaacaatcgaagctagttgcagttcgatcaagaaaaaatcttttgtaaaaaacaaattggaggaaaataaaaatgactaaacaagtaaactttcgaccagaggtaaaaaaggctacatcaaaatctaacggaaacgtagaagtgctactagtggtaaacaacggatcactgaaaggccgctatgacgatctgagcgactttttaggcaagacagtatcagttacgatccaacctgaaacagtcggctacacgcttcctatcaataaacagactaaacgtccgaacgtcaattatgcagtaaatagcgatggaacaattgaagtcttgaaagaagaacaaacttctttagatgtcggtgatggcgttgaagaaattgaaatggttgagattcaagtttccaaagaaaccattgatgaattcattaaaaatgctacctcattgccattaccggacagcatcacaatcaatcctcgtgatgtattaattcaaatcgaggagggcgagaaaatttccgaagtagctgctgtttatgaaatgtctgaagatgcattgattgatcagattgaaatctctcgtcagtacttcgcaccattcgctgatacttggagcaagaaaaaagatgaagtgatcttcaaagaattatcaggtgattcggatggggaagagtgacggcaaaataattattctggaagatgcaaaattctattggagcgttggcgtgattaaccaagcaaaagatctttttgaaaagggatttaagccatcacaggtagcggaaattatgaacgaaaaagtgattgatatcgggttagtatatctttatttgctggaaacaaaacaattgagaaggtgatcgtatgacctgcagcagatgtaaaggtgaacgtatcatttgggggaaagataaatttggccgggcagtagcaatcaactgcccggattgcaatagaaatggaatcgcggttcggaaagaaacaaaggagtgggaacatgggcatcacggaagttttctgggcaaacgttgattggcatatgaaaaataaaaatcttgttttaagcaaaacgcaaatgattgctaaaagcaaaaggactagcgtcacacttaggacggttggagaaatcgcaaagaaattggatattgatgattattctattttgtttgagcagttggatgatgaaatggcaagtcagcaattggaagaaataaaaaactaagaaaaggggaaaagataatgattgaatatcatgctttagaagacctaaagaaaaaaattgttttcaaaaaaattgtggattgggattccgataaattagttctggaagatgggacagaaaatacaattgaatgctctgaacaggattgttgcgcttgggctggtggatcatttacagatgtgaaattagatgccgttattacagatatacaaattcacgacaaaggacaaaatattttcaatggtgacggtcatgattcctatgcagatgtaattatctatcacaatcaaaatgagattgctaaagcagagtgcgaagctaacgatggaaatggcggatattactatagcatttgtgctttgagagttaaagatatgtggtctgtaattacacaggcatagtcggctatccaccaaaataaccaactgaaggagttttagcaaatgttaacttttgaaaaagtgcaacaaggaaattttgaacttgtttacaagattccgaaagaagtaggacaacgttacgaagaattgacttctttttaccgaggaagagactttaacaaggagattgaaagttatatcgaatcctttgtaaatgactttagatcattcgtcacaccagaaaatgaaaaagctctggacgaaaggcttgttaaatacaacaaattggtagttgagttgcgaaccaatattttgaaagcaacgacaattccatctgtaatgatttccggcggtgcaaactatcccactagaaagaaaaaacgtgaacttgatcgcattcatgagttggaaagggaactatacgccaacgatgggaagcatgaaagatttttagataatacaagaaaaatgtttgatccagttttgatcgaacaaagagaaaacgtagaagctaaacgaaaagctaaagcacaagaagaaggctggcaagcattttatagcgaacttaaacacgaagaaattgctggttatggcatcgatttagaagagaaccgaatttacatcgtaactaacggaaagccgtccgaggatataagaggcttattaaaatcagctgcaatgcgttggtcgcccaaaaataaacgatggcaaagaattttgaccgaaaatgcaatacgagcgattgaaaataagattctcattccgctcaaattatctgaataatagtcagctatccgacgaaatagcagaaagtgaggaagagtgatggaagatcaggtaacaattccagatgttagagaagccatcaaaatggcaagggaaatcacgccgattatgaacaacactgaatacgccacattgatgatcttttacaatcaagttttgaatcggtatcaaaaagaagtctatccagacggattgccagaggaaaattaattccgcaatcgtcagcgatagctgattgtcagagaggtgataaaaatcttagctactgactatatagattctcataaagataagaatgggaacgtgccgatcatactgaattgtggtgtgaagcataagaacagaattatagtcctaaaggtatcagctgattttgcaaagtggatttacttaacatcgggaacaggcgcttactacacaagtgcaataaggaccgttgacaaacaaaatgtattcggagtaacagaattatatgcggatcattttccaaacttgagaatagaggagggataagatggtaccaaaatttagaggtagaaatattgaaacaggggaatgggtgtacgggcatctattttactttgatgacggtcgacacttcatcagcccaacaggaactgatgttgtaggaggatatggcggagcgccagctaagtatagattagaaagtttaatttgctttgaaatcaaaccgaaaacgcttggtcagtccattggtttggaagacaagaacggcgcggaagtttttcaagatgatattgttagatgtagtagaggttgtcctcatgaggtggtttggctacaggaatatgctggcatgtatgttggtggaatgcctgcatggtatctttcagggctaagtgaaggatatgcgtggactggcgaagaggaagttatcggaaacatctatgataacccggaactgtttgagcaagccaatgaaaactagccaagcaatcatattgatactgctgacaatcgcaggtttgagtttgctatcctatacaatagtggaccaacaggaacaaattgaacagttacaagaacaactgcagcgtgagcagatgaagtacaagattattataaacgatccgctggtgagagatgctatggaagcagggggataaatgatggactttgtagtgttagtagccgtggcactttttgcggcagtattcgcaagtgtaattttcggtaaggaattagatgaaaaggagaagcaagccattgccaaagaaaaaatcgaaagtaaaaaagaagaagcgtaagttactagaaaaagccaaggcgaacggaaccataaataaaaaagtccttggtaagactttgaagagtttgatcattgatgaagaacatcaacatggctcacattttgataaataaaaaaagccactaccttttgggtaagtgacctgtgacaagactattttaccataaaggggtggcgtttgtgagatttcaatggcttaaaaactaccaagacttagaagaacaaatactcttcatgaaatggaatcttaacaagagtaggttggaattagatcgatgggtcaacggtgatttagcaaacgtgcgccttgaaaagaattcaagatcatcatcgttggaagaaaatataagaatcattgagaatgaactagagatgcttgagaaagaaaaaattgagctgttggaattaatcgattctttcagcggagcagacaatcaaattgtaaaattaaagtatattgatgacatggatgtttatgatatagcagatgctactggttacagcgtatcttatatcagaaaacggcatacagagattcgcaagacattatcattcgtggatgagtacgaggcaagacgagaggaacgcttaaagaagcaagaagaaatggactactattcagcagaccaggatcagttgagcttgttttgacattgccacaaaatgcgacctcaaagcctgtgtatatttcttgatttaaacgggttatagtaatagcgtagaagaaccggagagccggttattggactactcacaaaattctaaaaaccgaaagggggcaaatcccctcatcgctcattcttcttaacttgaatagaaagacagcacattaatttgatggaggtgattcctcttttcaaaattcgctagtgctgtctttttattatttctataatcggttatcctttaagtataaatttataaaggagattaatgattatgggagaaaaaattgatgcaatcaaaggatttttatttgaaaatgttctatctgttgtttctgaacaaggaaaagatattttaaaagaaaatgtcgtacctcttataacaaacgaacttgcaagacaaggtggtgatattttgattgattatggagctagtttgataccaggtataggtggagctataaccgaatttagaacaaacaaaaaaattaaaaatttagaggtaatggttcaagctattagcaaaagagatgaagagctaaaagaaaaattcgaaaaacaaactttgaagaataaacaaattttagatgaaatttttgaaatggttatgagaaaaattgaatctaccagtcaatcggaaaaaattgagtttatgatcaatggttattcagaattcttaaatttggataatccatcttttgatgtggcttatttatactttgataccctagataaattgactattttagatatttcggttcttaaattatcttatagagctaatacacttgaggatattgacgggtatagcaattatgaagagttacttaaagcttttgatattaactacgatcaatatgttgcaataagggagaatttaaatagattaggtctgatggaaaatgagtatgatgataagcttgttaaagatataaataatcttcaagttgcaattgatgaaatcagagggtctacggagagtatcataaaagctttatctggtgcgagaaatgctaaaattaaaaccttgtcaaataaaagtaaagttagactaaaagcgaaagacagattgaaaatatctaaatttggcagagattttattcgattttttattattaataatccaaatgaataatttttatctaccttagagacgttgtgcaaaggagtgtgattttaaatggctgtgagaggccctacaaggcaacagaaacttttcgtagataattaccttaaaaaccgaaaaaagaaccagacgcaggctgccattgaagctggctatagtcctgcatctgcgagctcacaagcttatcaactccttcaaaatcctatagttttagaatatcttgaaaaacgagaaaagcagttggaaaaggaattgaaacgtgagtttttctttgatgctatagatgctcgaaaagtattatctgatattgtcaataatccggaaagcaaagatgcagatcggattaatgcagcgaaagatttgcttgatcgtgctggctacaaagcagttgatgtccatgagatccaatctactgttaacatcaacgcagacggattgaccgattctgaactggaagaacgcattgccgagcttgaaaaggaattagcatcggctagtgatgacgatggataaaatacaaaaataccgttacttaaaagaattgaagcaattaaaacgagagaagttgttacgccaagcgcgtgatgacttcttttcttattgtcaattacgaataccagacctctataagagtgacaggaaatatttgaaagatctttgccaggagtttgaggaattcatgaagtctgatgacgacatcatgctgctcaatctgccgccacgtcatgcaaaatcaacgactgctggccgttttgttgagtgggaacttggaaaaaatcccaaattaagagttgctactggttcatataacgaagatatggcgaccgatttttcaaaagacgtgagggaaaacatcgctgaagaaagagtaatagatgatcaaattgtttatacggatatctttccgaaagcaaaattgaaacaaggatcagcagcagctaaacgttgggcgctacaaggaagcaagctttcctatctggcgacatcaccaggaggatccgcaactggtaaaggctttgatttactcatagttgatgacgtaatcaaagggattgtagaagcaactaacgaaaatgaactacaaaagcattgggactggttcacaaaacaaatgctttctcgtgttgaaaaaggcggaaaaatcatagtcattatgactagatggcattcgaaagatctggcaggacgtatcattgatgaaatgcctgcgatgggttataagttacgcgttgttataaaaaaagcccttcttaacgaagaaacgcatgaaatgctttgcccagacattttatcttatgaagatttcaaaaagaaacgtgcggcaatgggaacggcaatcgcaaatgcgaattatcagcaagaaccgattgaccaaaaagggcggctttatcaaaagtttcagacatatgataaattgccagacaacgtcattaagatttggaactatacagatactgccgataaaggtgcagactatttatcatctcctgtttgggcagaaacatccgatcacaaggcttatataattgatgttctttatacgaaggaaccgatggaagttacggagaacgcgcatgcgaacatgattgctagaaataaagttaatcaagtacgaattgaaggtaataatggcggccgtggctttaaacggaattctgaaagaaaagcaaaagaaatcggatattatggtgcgtattgggaagacttccaccaatcagcgaataaacaatcgcggatcctgtccaacagcgcttgggtcgaaaacaacgtctactacccggaagattgggcaattcgatggccggaattctatgaagccatgaccacttatcagcgtgagggtaaaaacgcacatgatgatgcgccggattcagttacaggtatcgccgaaacacttcaaatacaaaatcctcaaagcttagaggaacgaatggaagcagccaaattcttttttggctagaaaggaaaagagaaaatggatagtaaaaatattacatttttaagaaaccatcgctaccacaagaacgcaaattctgtttttagaatggcacaagaagatttcgattcggtggaatttgattgtgagatttggatttcacgactagaaaaattcattaatcgacatcaaaatgaacaagtacctagattgaaagaactcaagcggtattctttatctgacaacaatatcaagtaccgtcctgctaagacggatgaatttgcagcagataatcgtattgctagcgattttgcgcgatatatcaccatttttgagcaaggatatatgttaggtcaaccaatccaatacaagaacgatgacgataatatccaagcgcacattgacgatttcaataatagaaacaatgaaacttatcacaatgtattgattaagacggatttatcaatttacggcagggcctatgaattggagactacagtgttagacgaagcaggaagtgcttatgtcaaattagtaaaattaaatccggaacagacctttgttgtttacgacgatacaactgacagcaattctttattcggcgtttattattacacactggattatggtgacggtgttcgcaaagattttattaatgtctatacgtcagacatggtctatatgtatgtaaacagcaatcaagataaaaaaggcatgcatctagtcgattttgacgattatgcatttgacggtgttcctgtaaatgagtttgcaaacaatgaagatcgcactggagcattcgaaccagttttagattcgatcgatgcttatgatctatcacaatctgaactagcaaattatcagcaagatacaatggatgcaatccttgtaattgctggaaatccatatacaggtacggcacaaaatgacttggacgaagaaggaaatattgttcctaactcccggcttgctatttcattagcgttcaaacgtacgaaattgatgtatttggatgacaaccctaatcctaatggcgcgcagccaaacgccttctacttggtaaaggaatatgatactgaaggcgctgaagcctacaagaaacgcttagtgaatgatattttgcgcttcacatttactccggatgtaacagatgataatttttcaggtgtccagtctggagaaagcatgaaatataaattgatggctgcggataatcgtcgcgtcatgcaacaacggttgtttgaaaaaggcttaatgcgacgtctacgcctagcggtgaatatttggcgaatcaaaggcaatgattctattgcttatgatcaaatcaatgatacgaatatcatatttacagccaatgttcctaagtcagacagtgaaattgttgcattggcaagtcagcttgtggggcaagtttctgatgagacactctttgaaattctgaaaacagtcactggtgtagatccagaagttgagttggcacgaattaaagaagaagttggggagaagccattgccaagacgacctgaaacggaggatgaagacgatgaatgaaaagcagttaaaagaactaatgaagatgaatgagaacaatcaaacacttgaagccactttctttgaaatgcaacgcagtttagagtatatagctaaacaaggtaaatgcttatttgataattgtatagcggaaggatttaacgaagaacaagcattaaaatttacgattggtattctaactggtgccgcgaagtaaggagctgatcctaaatggctaaactcaataaatcaccgaaatactggtccggtcgtatggatgaaatcatggcttatgttgatcgaacggatatcgatttcttcgatgagttgcagatcatttacacagaaggccgtcagaacatccagaaggagatttacaacttctacgctaaatgctccaaagaaaacaatatctctattcaggaagcaaagaaacggctcatgcgagaagatctatctgattatcgagcgaatgctgagaagtatttcaaacaagctgaaaaagatcccgaactattgaagcggctgaatgagcagtacaaagccggaaaggtgacacggcttgaagcattgcacctagatatggaatggcacttaggcaaaatgagcggagcattgcataagtcattcgatcgatatctaaaagaagtagctcaatatgcctatcgtaaaataatcggcggaaactctaaaagcacattgaacaaagctgctttggaacagattgtaaaaactccatttaatgggaaaaattattcttccagcatttgggggaatacagatgatcttgccaaagacctaaaaaaagttcttactcaaggatttattcgtggatctggtccagcagatatggctcgtgaattgcgtaaaaaatacaacgtggccaagaacagggcagaagcgatcgtgcgtacagatggaacaaatgttgtgaatctatcagcagctaaacgctttgaagattttggattgaccaagtacaaaaacaatgttcatgttgacgatcggaccactgaaatatgcttgcgagtaaatcgtgaagataaaacttttttgttagttgaatatcaacccggtatcacagcgccaccttatcacgtgggatgccgaactggaattgttccggacgattcagaaataggttatgaagaataggagtgatatctatgatgatgaaatttgtcctaatgcttgttggagtgcctttaatagcattatcgttggttattacaattacaattttaaaaactggatggaacataattaataaaaaagaaccacctgattttgatacaacggaatccaaaagccagcatggcggaaagtgatggtgatccacgtatctcgcagttatgcgttaaatagcgattataggaggtacccatgaatttcaaagaattgaagcgtaagaaagaacgtggtgtgagcaatgaagagttcatggatcaatcaaaagaattctttaaagatgcggaaagtattgttgtggttggtgtacatcagaatggaattatctcgtccttttacacacaaagtacgtccctcaacgctatcggcatgatggaagtagcgaaacaacaactaatacaggaaatggaagcctagttactgactaaggctttttattttgtccaagcgtgatgacattaaaagcatcggaagtgcaagcattgatccacgttaaaagctatggaaggagcaacatatgatgaaaaagaagttatttatgccattgaatctacaatttttcgctgaagatggtggaggaaacgacccgggagatccaacaccaaatttcaacgtggatgaattagatgaagaacaattggcagccattaaggaaaaatttggttttaaagatgacaaagatgttgattctatcattaaaaacaagaaatcaagatggcaaaaggaattagaagaacaaaaaaatgaagctgctagattggcaaagctatctgaagaagatcgccaaaaagccttgattcaaaaggaaaaagaggagttcgagaaagaaaaagaagaattccggaaagagcaattgtatgttgaaaaaggcaaacaactaacggctcaaggaataccagctgattttgcgcatcggattgctggcgatactgctgaagaaatcctagaggatgttaaggctttccgtgcagaatgggataaggcagtagaagcaaaggtcaatgaacgactagcttcaaaaagcaaaacaaaagttggtactggtgctggtcaaatgaccaaagcagaaatcatggcgatcaaagacactgctgaacgccaacgaatgatcgctgcaaacagagaattattttaggaggaaaaaccacatgaaaaatatgtcaaaatcaaacaaagagcgtttattgaaaatgcaattgcagttttttgctgctgaaacaaatttaacaactatggatgatttgggtgaaatcaagtcgattgattttgttagtcgttttgaagcaggtatcaaagacttgcttgctttgttaggtgttactcgattagagcctctttctcaagatttgaaaattcaaatgtataaatggacaactgatgtgaaaagcgggaatgttgctgagggtgaagatatcccattatctaaagtcactcgtactaaaggaccttcacatcaagtgacctttggtaaatggcgtcgtgctgtatctgctgaagcaattgcgcgtcatggtgcttcattggcaattgatcaagcagacaataagttacttcgacaaatccaaggcggtatcaaaacacagttcacaactttcttgggaacagcgccaaccaaaattaatggtgttggattacaaaaagctttagcaagctcatggggaaaattaagtacctttgatgaatttgatggagcagaatttgtttctttcgttaaccctttggacgtttccaattacttgggagataccaaagtattggcagatgcctctaatgtctttggtatgacattgttgaaaaactttacaggcgcgtcgaatgtagttgtcttaaactcagtgccacaaggtaagatttattctactgcagtagataatatcgttctggcttacttggacatgaatgcttcagatcttggtgatatcttcgtcgatttcactgacgaaactggatttatttctgctactcgcggccgtactttgcgcaacgccacttacgaatcactattcatgaatgctatggtgttgttccctgaaattcctacaggcgttgttgaagcaactatcgaagccgtagcgccaactacaacgactacaacgaccgaaggataaggtaggggatagaaatgctagaagacatcaagctgtttctaggtattcaagatgcgttacaagatccgttgcttaatttgattattgaggatagcgagcaacggatcttatccgttttaaatcaatttgctgcaaaaaatgatactgacaagcacaagactattccaacagacctgatctatattcaaagggatgtcgctatcaaacgttttaataaacgcaacagtgaggggactactgcagatagtgaggaaggtcgttcctattcttgggaaccatcttatttgaatgagtatctggatattttcgatgagtatactaagcccacaattcgtgccggcaaaggtatcacgaggttttttagttgaattacaatgatcgcgtcaagataacctatgaaagaaaagtccctggttatcttggagatgatgtcattgaagaaaaggaaacaattgaaccatgcggcaaaactggattatcaaataatgaacaaataggaatctttggaaagtacaatcagaaggcgttcaaattgcatattcaagggatccacaaaggtttttctaaaattgaatacgacggtttggaacgatctgtttatcagacgaagtggcaccgaaattcaacggtggtgattttgacatgagtaaaagcgtgaaaataaaaggcatgaagcaatttattcgaaacgttcagcgaaaagcacctcagttggataaagccattaatcaggaaattaagctttcaagcttgcgtgtggaaaaacgcagtaagaaattggcggcttgggatactggttggatgtcaaacaatatctatgccagtgtagttggtttgatgcaagcagaagttatctcgccagctgaatactctatctttgttgagatgggcactcgattcatgtttgcacagccatttctattcccagcattaaaggcagattggccaatcctgcaaaaacggcttacaaagctagtgagagggtgattgcatgtactctcctatgacagaataccttaaagatgtatctcaaaagctatctaccactggaatttcagtagaatttaagctccctgatcctgaagtcaaggagcctttttatgtgataggcacacacaccggggatgattcacctagtgctaaatttggaccagcgatcgttgatacaagtttgcagatcgatttattttatccgattaacagtcgaacaaatttagaagaagctatttttaaaacgaaagttgcgttaaacaagcgacttactcaccaagtacttattgatagctcagttggtcgagaagtctatcatgtagttttcagaatcaacgaactaataatttaggaggaatgaaacatggctattgtaaataatggcgtcaaaaaaactacaggtaaagcattgactgctaagaaagtctggtattttatccaatcagtttctgcagaaattggctcacctgcgctattgcctgcttttcaaacagaagggggcgtaacatatggcggagaaaatattgatgagcaaactaaaatggggcgtattatcatcaaatcaactgacgagcattcgattgatttgacacaatattttgtaccgaaagacgaagcgatcaaagttgtcaaagatgcaaagaaaaatggaacgtctgtaaaagtttggcgtgtggaaattgatgattctgttgctgaagaagccgaaggagaaactgatgtaaagctatatccagcggaattcggctacggtatgcccgatgatgtggagattgcggacggtgatgatcttgtggaagcttcttacacattaaacattatcggaaaacttcaagaaggtaaattcccattatcaaatgacgatatttcagcaattgaagcactgtatgattaccaaaacccaggtgaaacaactggagactacgatgatattcaaacgactacgaccacaacacaagcaactaccaccacaacgacgcaggagtaggtgagaaaaatgaaatatattctttgtcaacctgctatcaatcgtttcaagtgggaacttgaagtttgtttaactaacttgaagtcgttcggtatcaatgatattgtactgctttttagcgaacatgattcaacaattcctgcttatttagctgataaatacaatgttgaagttcacgtatatagagatgatagagaggataaaggttatattccttctatcaagccttatctgtggtggcaatacttgaaagaagatcctaaacgtgaaaaagagcggtatgtttatattgattcggatgtcattttcaatcaaaagattgatttgcgtaaaatgacttcaaaagaagatgtttggtattgcagtgattgcaaccactacctaaatcttgattatattcgcagttgtgaaaatggagaatctattttgaaaggtatggctgagatcgtaaatgtttcagtggaatcgttggaaaccattaattttaattctggtggtgcacagtgggttataaagaatcctagagcggagtattggaaaaaagtttatttcgattcaaatcgtctttatcaatactttaaaaaagtgaatagcaacattcaaaaatggactgctgaaatgtgggcgcaactttggaatatgatgtatttcaatgttggacctaaaatccacgaagaattatctttttgcttttctacggattcaattgagaaatgtaaacaagtaaaaattcttcataatgcaggagtaaccgaaaaagatcgcgatctattctttaaaggcaagtacgttgatacatcaccatttgaagatgatctatcttttgttaataaaagaaaagcgtcagcaaaatatgtggaagcaattaaaagagttagtcgttagactggctcttttttatttaggaggaatggttaaatgtcttttgatatcaaagtaaaaaacaaagattgcaatatcaaattcaactacgctttaaattttaaagccaataaaaaattgggaactaaagatgcggatggaaattctcaaaacgatggtgccgggattctttttgttcaagttctagagaaagaagatgatgctttagtcaacttgttacaacttgtcgataagaattttaccgaaaatgatgttttagaagctgtacaaaattatacagacaatcttgttaatagcggaatgggtgaagaggaagcctataatcaaatttttgctgatctgaaagaagaaatgttagcatcaggttttttcgtgagcaagatccgcaaatacaaggagaatctggagaaagctcacaaagttatagcggctcgagaaacggaagagtcgaagcttcaagcggacgagttgaagaaattagcggaaagaatcacgaaagagatctcatagtcaactgtgcaaggtatggtttaactgatattgatttgattatgaattgttacttatgggaacttgaagcaattcttgaaggcttgagtttgcgtgaattagacaaacaggaacaaaatgctatttttggatttaatttgcgctatatcttaaatgctaaaaagccacaaatgaaaaaaattattaataaaaaatcagcagaaaatcgaattaagaaagcatttgatcgaaatgctaaacaaacgaaaaaaggtaacaagcgcttggataaagctttgaaagctttggaacactttagaaataggaggtgagatagatgtcaggaagcattaccggatccattaaggctttgattggagcagatactggagactataaaaaggcaatgtcagaggtcgttagtagcactacttcggcaatgagtaaagtgcagtctagcatgactaatagtacaaatagcattgtttcaagggttggaagtattatgggacaattaagctctactattccttcaaaattaaacggattaaaaacaagcatggttgctccttttagtgctgcagggggtcaaattcaacgagtaatcgcatctatcggtgaaaaaattcctcagcccataaaaaaaggctttggagttgtctcaaaagctgcaagcgaaacttcgagcctagttgcaaaaggcttgaatgggatagtgaaaactacaacctcaattggtaccaaggttggtagtgggttaactaatgctttcaacaaagctggaacgaaagcagcatctgcactaagcaaaatgggatctaaaacaaatgatgtaacagatgccactagcggattaatcaaaaaagttgctggaattggtgcagcctatgcaatagcacaaaagggaatatcaatgatctcgggtgctattacaggattagttggagatctcaatgaaggatctgcaacgtggaaaacgttcaatgccaatatggaaaacattggcatggggaaaaaggaaattgctagtgtaaaaaaagaattacaagacttcgcaactcaaacaatctattcagcttccgaaatggctacgacatatagtcagctggcggcagttggtattaaaaacacggataaattagttatgggatttggtggacttgcagccgcagcggaaaatccaacacaagctatgacgactttaagtcaacaagctactcaaatggctgcgaagccaatggttcaatggcaagactttaagttaatgttagaacaaacacctgccgggatcgctgctgttgcgaaacaaatgggaatgtcaacgtctgaaatggttacggctgttcaagacggtacgattaaaacacaggatttctttgatgctattactaaagttggtacaaataaaacattcagcaaaatggcaacagaatataaaactgtcggtcaagctatggacgggttacgtgagacgttgacgaacaagctacagccttcttttgataagctttcgcaagtcggaatcgatgctatcagtaaaattactgataaaatcggcgatttcaacatggataagattaacaaagccatcgacagtgtgatcccaattttggatcattttatcaatgggacaaagttgtcaggtgatgcgctgaagaacatgcagagtgctatctccagaattttaccagttgttgctttgcttggtggcgcgttgacgttgagtggcgctttaccaatgttatcaaagctgacaggcgggttcattaaattttccggtattttatccggccctttaagttcagcatttggaatagtttccggtggtgtcagtggtttaattggactttttccaaaaattggcggtggactttcgtctgcggcaacggttggaatgggcgccttgggcggtatgacttctgcgatggcaacgattatgcaagttgcactagcatctataggaccagccgcaatactaggattagttgttgcagggcttggtttagtaaacaatcaattcggggatcaaattgatcaactgttaaaaatggtcacaacaaagggacctgaagttatttcaaattttgtcaaagggattacttcacagctaccgcaactaattacaagcggaactcaattaattagtaagttggccaatacgattgcaacaatgttgcctgttattgtgcaagctggtgttgatataataggttcactggttggaggagtagcacaaaatttaccatcattaattagttcagcattgaccatcattactactatattgacttctttatctagcgcgttacctcagctaattgtcatgggtatgaatttattgttaagtctgatcaatggtatcgtagaaaacattccacaaattgttagctcggtacaacagattctgcaagcatttgtgggaaatatcgtttcgaacttgccacagataattcaaacaggtattcagatcttactgaatttaattaatgggttgacagaaatgttaccgcaattactaccagtcgctttgaatgctatcttgactttaatcaatggattgatggccaatattcctcaactattaaatggtgccgttcaaattattcaagctttgtgtaattttattgtgcaaaatctgccaatgatcttacaagcagcggttcagattatccaagctttagttagcggtatagtacaaaatctacctaatatcatttcaagtggtattcaaattatcatgtcattggtagcaactatcattcaaatgttgcctagtattttagctgctggttgggatattgttaaatctcttgctagcggtgttttagaagctattcccggagtattaaaaggtgcttgggatggaatcaagaatggatttagtaatttgtgggatacaatcaccggcaaatcaaaatccaaaggcgatgaaatggattctgatacacagtcagctactcaatcagtcgcaagcagttttagtacagcgaactctagcgttagtaaatcgatgtctagcatgcaaatttcagtatcagatttaagcagcattgcttcggtggatgcaacaaaagccgctaagaatgcaaaatctaatactactagtgactattctgcaatggccagtgatgtaacgagctctttaggtagtctacaatctagtgttactagcaatatgaatacagcaacacagaacgctacaagtgctgcgaataccatgcagaacaatgttaataacagcacgtctggcattaatcaaaattctacgaaacagatcacatcaatggctagaagcgtaggtcagtctatgcagaacatggagcaaactgcttcaagtgcaatgcaaagagtatcaagtacggttaacaaaggtttttctagcgtaagtaaagcaagcacgcagtcgatgagccaagcaactcgttcaattagcagcagcacttctcaaatggcttctgcctttagcaatggaatgaataagatggtttctacagcaagaagcgcatcttcgcgtatagtatcagccttttcaagtctgcgataccaaatgaacagtatcggctattacgctggttctgggcttgctagtgggctttcgagttcgtcgggatatatttatagtgtagcaaatagtatcgctgctaatgtacgaagaacgcttcaaagggcattggatatccattcaccttccagagtcactgcttggatgggggaaatgctaggtaaagggcttgggctagggatgcagtcaatgtttggatttgtagccaaacaagctaacgagttcggatccattatcaaagcgcagcagtatcaagcagaagcagttatggttggtgatactactttcactaataaaaatatcagtaccctgactgatgaaatggatcgagatatcgcagaatcagaactcaaaaaggatgaaatctatgtccacaatgaaattgttggagataagatttacacgacagttaaacgtaaagaagcacgtgataaaaataaaaacgattattttaactaaggggggaagatcatggatgctttgatcacaaaagatggagttgaaacgaaactttcctccattgggttacttgtcactgactttcaagacagttcaccttctataaccacgaataaaagagaagtaacaaaccgaagtggatatatattctccggggcagtacacaaagaaaaacggatcgttatttcaggaactttcgttgttcaaagcgcatatgaattagaagaaaagaaggatcagataaatgggcttatcagcaatgatgagcctttttatattaccaaattatttcctactgctggactgtatgattttgaattacctggtcaaaaaacaagcgatttaaatttacttgctattccacatcaagcgtataagtatcgatacaaaataattgtagaaaacgaaatttcatatacatttgttggattatcggctgcaggtttaagaatgaaattttcctttgaaggaagaacagcagaacttccatttggggagactattccaagatcagttactgtttcatcaactattgattacgcaggaactgcaaaatgtagccaattagaatggccatggataatgaagctcacgtcgaatgctatccaaaacggtgatgtgactgtaaaagttggggatagaacatttatctatcatgctgtaacacctatggcaagtggtgatgtattgatgattaaagggatagaaacaacactaaattcgttgaatgtcaatgataaaacgaattacgagcactttattttaacaccatctgcaagtggaaaaatcgctttgacaacaaattttaaaggatcaattcaactactcaatttcgttgaactctataagtagggaggtgattgagtgattaattttattgatgaatacggtaaacaacacgctgcaattgttgagtgtcagaaaacaaagggcgtgaatggcgaaaaatctttatccggtactatctatacaaacgatgaaattttagaaggtattggtcgtggatggcgattacagtttgaagaggaaaattattgtttaacctatgtaaatcctattgacgaaggtaatcgtattgttgttgagttcgatgcggttcatgaattcttttttgatttgagaaaatctgtaatttattccgaaatgaatggttcaaatactgctaatgcctatctgcaattcattttcaatggtagtggttatgaatatcgcttagaagtaaccataccatcttttgaaaaagaaagttttggaatgaaaaatcgccttgatttattcaaagattttatttcttctacaggtgttgagttttcggtaaatgggaaaattgtccgtattcttgaaaaggttggaacaaatctttcaacaatagtaaaaaaaggattcaatttgaatgagcttaggatagaaaaggatccgggttctttcattacctatttgagaggatatggtgctttttttgatcccgatgatgaatctaaggggagattaatagttgagtatttgagtccgcttgctgagttatacggaaaacttgagggcgatcctatcgttgatgaacggtataaagttgaaagtaattttattgatcgtttaaaaaatgatgtggaaagttcttatgggatatcagttgatatcgatatggaagatttaacgaaagctggttatgaatatgatcaaccccatgagggcgattatatcatggcaattaataaggatcttggatttgaacaaaaaattcgaatcatgtcatataccacaagttatgatactgaagggaatattattgatcatgatgtatcatgtggatctgacaatattattcaaaagaagatcaatcaagaaaatgaataccgtaaggaagttcaagctggattagaaaacgcaataagtactgcaaatcaggcttggatttctgctgatggcaaaaacaaggtttttcaaggtccggatagacctacagctacaaataaaggcgatatctggtatcaggtagatggtgaacaaaccatcatgaattactgggatggcttcgattgggtgccatttatcaatccagatgctgttaaggaatcagtcgatcaggccaagcaagctggtgaacaagcgcaagctgctgctgaacaagcatctagcgatgctcaagcagcaaaagtcaaggctgatgcgattcaaattgatgtgaatagtcttgtctctgatgttgctactattaatggtaatgtgactacaattagttcgaaagcaaatgaagcgtatagtaaagcccaagaagtcgagggtaagacagtatcactcgaaaacacagtgagtggttttactggacgtttgacagacatagaaactgtgtcggacgctactaccaaaaaggtaaatgaattagaagtcacagttgatgggcagaagcaaactcttgctactgtgcaaacgacagctaatagcgcattgagcaaggcaaatgttttggagacaacagttgagggtgtaacacaaaccctttccagcgttgagtacaaggttgataacttagatcttacagacacaaatattttacccaaaagtgattactcagataatttgagtacatggactggtgatggcgctactagagaactaataagcgacggaacaatgagaattacttttagtggtagcggcaataaccgtgtttataggggaaatttattcaacttaaagcaaggggacaagttttcagtaagtttctacgcttggtcaaatgtagagggtgcacagattagagttggaacattctataataatcagactgtaactttaacagctccgggtggaggtcctggaaagtattttgagttgcatgaaataaccatgggaactgtatcaaacgccttatctattgttggaattggcacatcatcatttaatgtaagaatccataaaattatggtgactaagggtaataaagcaagaccatgggcattagccccaggagatatggcaacagtttccaaggttaatcagattgagtcaaccgttgagggaactattcaaacagtatcttctgtgaaaaatatagctgattcagccctatctaaagcaagtcaaactgaaaccactgtaaatggactgaaaacaactatttcaactgttgagacaaccgctaattcagctcttacaaaagctacgcaggtcgaaactaccgccaacggtattagacagactgtgaccgaaatgcaaggaagcattgcagacctagtcaataaatttcctgatccagacttccagaagcagaatccaaagcctacagtagaagggtatgggataactgggcaatatgatgcaagtggatttcttattgataatacctcaggaaccgctaagcaaagggtttattggggagctgcacctgttgctttaactgtcggaaaaacttataacatcaaactatacatgaacacaggaagtactggcggaacagtagaaattggctcatctgagggagaaaacattaaggttacgcctcgagcaggatatctcacatgggttcaaggtactatcaaagccacaacatacactgcttttagtatttgggtagaagccggcaaagcagtaaggctacgagaattatatatctatgaagcaaatacagatgttacatctgctcagtttactcaactgtccgacacgatcaattttaaagtgtctaaaggtgatgttatcaaccaaatcaatgtatcaactgaatcaatactgatttccggtaataaagttcacattacaggtcagacaacaattgataacggagtgatcaaaaatgcacaaattgcagacctttctgtatcaactgctaaaattgcgaatgctgcaatcactgatgccaaaatcggcagtctatcagcgactaaaattactacaggcacgttaaatgctgcaaatgttaatattattaatttaaatgcaaatagtattactacgggaacgatcagtgggactaacttatctataaaccttgctactggtgaagtcattttcaacaagggaatcatcaaaaacttagatgatacttttcaaatgaacattactactggagtaaccgcatctagaggtgaatatttatcgccaaatgatacaggtaacactttagcagcaggttataatctgatgaacggtaaaattgagttttatactggaacatttggcgaagcgactgtatcttatggtgggttgacaaccgaaacacattctggtcagtataaagaaaatggtatctggcaagctggcatgtggtcaggaaatagaccagcaattgctttgaaaatggctaatccaaatacaagcgtgtggcaatctgtacacagagccgttcttttatcatcaacagaataccaagaaccattctcgagtagtttttttactgatgctacatggttaggttatggggataaaagcggtgctgatactaaacagaatatccgtggtgctggtattggcgtaaaacaatctggatcagacgtcaacaaagatgagtctggcggtttgttttcggaagcttgggttatagcgagacatggtgtttacttagctagcggttatgcctatgattctacgattagtggacgcagatatttagcacctactattaggctcggtaccacaagagtaaatagtggtgctactgaaagcattaagcaaatggcttcaacagcaacgataactgctggatacaaaatagctatgcagtcgaaatatattgacttatgggctggtgattccggagaaataactctaaatgcacaacgtacagatataaatggtggcggtgattcctcgttatatggtggtataagttttggtgcagactctaatggtgcccgtgtatggtctaaatcgatctataataaaacctattcaagtgggccgcaagtatgcgtcacaagttacgggacccttggtcggattacctctgctcgtaagtataaaatgaatattcaagtagctaataagatagtagctgatgccaagaaaattttggaaatcaatccagtatcatggattgataaatttgaattgagttcggggaacgtaaaaggccgatactatgggtttattgctgatgaatttcacgaaaaagggatgacagaagttgtattctacgatgagaaaggtcaagttgaaggattggcctatgatcgattgacgatgtaccacaacgtaatactctctgatcacgaacgtgaagttcaattgctgaagcaagaagtggaacaattaaaaataagaatacaggagttggaagctgcttagtttctaactcctgttttaatggaggaaattatatgaaaatcacattgaagaacaacgagttagcaccagcaatcaattttttagaaggtatgacgcttaaagcgaataaggacagtcgacaccgtacaaagctggtaaaacgtattcgagaagcctttacagagctttctgatgaggaaaagtctctgatggaaaaattcaatctgcttgatgagagtggccaactcaaagagggcaaagatcaagatgcaaaagatgtggctgctttcaataaagaacaagaaattttgatggatgaagaaattgtgattgagggcggtatgtatgcgcgaaactttgatgaagtcccacggattttgaatgagtacgatggcatgttatctggtaaagatgccgagatctatgatcggttgttagatgaatttgaaaaagaaattgctgaatagtcagtattattaaataaacaggaggaatttatcatggcattaaatactaaaaaatcaatcagcattacaggagaatcgaaaattaatgggcagcaagttatttacctaaatgctaatgtcacaacggatagtgctggaaatacaaatattaaccaatcgattactgaccaaaatctgtaccgtcaaaatcgcgtcgaatgtcgtaaagatattgatgattttcaagcaaaggtttgggcaattgaggatgatttattaaatgaagtggaggagcaggcgtaaagcttgctctttttagtttatgaaagcaggtggcatatgtggaaatagaaaagcaggtccaagcgcatgaggagcggttaaaacagcatgacaaagagttggggcgtcttaatgacattacattagaaatgcaaaagtcaatgaacgaaggacttgcacgagttgatgaatcaaatcgcttcttacgtgagcaaaacacacgacagagcgaacaaaatgctgaaatcctgcgtgctgttttgaatagaaatgaaaaatcagaagaacgggattatgaactaaagatggttgataaaactaacatgtggaaaatgatccttggtattggtgcatcagcaggagctgtatttgcatttgttttagaattaatcaaattttttggaggtagataaacatgaacaacattaattggaaattacgtttgaaaagcaaggcattttggttggcagtgattccagcattggcattagctgtgcaagcaattgctgcagtatttggatttgagtatgattttggcgacctggttaacaaactgatcgtagtagtcaatacagtttttgcagttctggtgattattggcatcgtcaatgatccaacaactacaggtattactgatagcaagcaagccttaacctatgaacagccaaagaaagatacagtcgattatggagatggccaagaattcactgagcgaaaggatgattaaaatgagtattccaacaccagttattttggatattagtgaatggcaaacgccaaacactatcaattatgataagttggccagtgctattgacggtgtaattgttcgtatacagtatggatcaaggtatatcgacaagcactacaaaactcatattgcagaatttcaaaaacgtggtgttccagtagcggtgtacgcttgggttcgaggagtttctaattcagatatggagaaagaggcgatagatttctacaatcgtgctaaagcatataatccaacattctggtggcttgacgtagaagaaaaatcaatgagcgatatgagaactgggattgaaaagtaccgaacaaaattgaaatctctaggtgctaaaaaagtgggggcatatattgcaaaccacttgtatgccggctttaatttagatacttcaaaatttgatggtatctggattcccacatacggttcaaacaatggccagtataatggttcgaatcccacagctacttctaactatgatctccatcagtacacatcaaatggaaaactaagtggctattccggaccgctcgacttgaatcggattgttcgcaaaggatttgaatatctttttggtaagccttctgctagttcaaacaacaatgggtcatctaataactcgacgataggaggaaaaataaaaatgaaaactgtaactttaaaagacaatgttaatttacgtgttagcgcaaatactaatagcaagattattgcaaccttaaaaaagggcagtaaagttgagtttaatgatattgtaactggttcaggctatatttggggtgtacaaccgcgaaatgattcttacaagaaggggtatattgctataggtaagttgtcagattggggaaatattctataatatgcaaaaggcccactcgtttgagtgggcttaatagttctatttaaagactatgtgggttaaaatcatgtctattaatattatgtctattacaatccacaatgttaccctacccctaaaaagagaaacatcttcatggatcttctttctaacatttttaactcccataaaatcactccttatccttttcacaaacaggattatcaataatttcatgatcttctgtactttgtctggtccatgtattaaccatcagaacaaaataaaaaaacaatagaattccccatgctaatatcactaaccaaccatcggttaaatgaagcaaccatgttactacagcaataagtacaatgagcaggacagaatattgaatagtttcttttattcgttcttcttttgttgtcgggtgggaaccagttacaatagatattttcttgttcatgttaagcaatccttttatagttctaagatctcttttttcttcaactcaaattcttcttgtgtaataatccccaaatcaagtaattcttttaattcttttaatcgttgtgtagaagaatgttcatttgatttttcaacagtagtatcttctgtataatcaacatttgcaataaagcgttctaggttactcgcttgtgccgactcaagaaaaacttttatttcttctatagagccattttctaaatttcgtaaaaatattttcccttcactgccaacttcttttatagttgtggttgatttagtatcaaccttactttttcgttttccagcactaccaataattgctcctgctggtcctaatagtgccgcaccagcaatagtttgtcctgtcctaccttttgttttaatattacctgtagttgttgtttcttgggttatagtgctcccattccactcaaaacgctcaaattgatatttagttgcatttggatcatattttttggaaacgtaaaaataatcattaatatctcgtcttaaagtaatcgaatctaattgtttcataaatggttttttcacaggcaagacaatcttttgttctttcttgttttcttgatgattagaaagagcggtactagctgcattttcaattggcttcatcatattcccaatgtttttaccagcaatatctttggatttcaaattatctatttgttctgacatggcttttgtagctttgtcttttaccttatcaaacagtcccattttaaaaactcctcacttttttcttttattgtatcagaaaatattgtaagaataaaaaacatttcaacgataaaatcgtttattaaccgaagatgttatttttttagaacaataatattgggggcaaaaaaggggcaataaaatgataattcatgataattagtgcaattatattttatctagaaacagcgaaaattattgctgtgatagtaatagatagtccatatacattggttaagtattttaagcaggagtctccatgtgtctgattttttttaattaactattagctgatgaaaatcagctttttttgttgccaaaaagcagaactgcgacttctctaagtgagttcttctgagggggtagacaaacgccctttttttatatccttcattcaataataaataaaaaaaggggctgtgccataagtctcctacaagtgaaatccgaacatgatatagtattgctcttgcggtgcaggggttcctcgtcgcaaaagtcagaggaatctatcgcaatagaatatgatacggtttcacttgttggatgatgacttatggcataacctcttgctaaaaagtaactactggaatagttatctgtctaatctcatataaattagtggatatggattgccttgttcgtcaaacgctgtttttttataaacttcaaatcccatgtgttcataaaaatcttttgcaagcgggttttgttcattcactgctaaattattaaccaaatatttttctatgccgtatgtaagcaattctttgcctaacccttttcctctttcttcgttagcaataaaaagcatttcaagatgttgctccacgatccccataaagccaacaggtgcttgattttcgttttctatgagaattaaataggggatttcttttaatgcttgtggtacatacgtcttgatttcttctatttcatgatctgatagaaagagatgcgttgctcttacagcactttcccaaatggttaatagctgttctatcaatggtgccgttctttcttttacctctataattttcaagttcttgacctccaaaacctccgatttttttaattatattaaagaaaaaagataaaaacgaagtgctgtatatccaacagatatacagcacttcatgacacgaatgaagttagttgcagtctgagaaccactacacctataagcgaggggttctattattgtttgtagcagatcgaattagatatagtcttcatgccgagggccattcctgcggatctcttcttgttcttcagcggataattcagtgaagatatcactaccgtctaaaaacgtgttccaatctgtccccatcatctcatgaagtgtctctggatcctcgtcggataaacgatgggaggtctctccatccaccgtttgttgtttctcagaggaagaagtgtacttgtggccaaaaagtttttcccactctgctcgtaactgttctaacatcgaaatccctcctttttttttattgtagcacaaggtctttagaaaggcggtccaaacgctggaaacaaaacctgaatcgaaaagcatccctctggtacctcgcaaaaattgtgctattctaatagtagttggaacattaagctgaagacttatcaaatagccgacagcaaatgggtgagaagagggataagatggaaaaaattacgctagtacacacgaatgatttgcattcacatctggagcattggcctaagatccgccgttatcttaatcaacggaagcaagaagcagattcgagtcaagaaacagtgatttctttggatctaggagattttgtggatcggtggcatccattgactgaagcaacgaacggacaagccaatattgagctgatgaaccaaggacactatgatgcagtgactattggcaacaatgaaggtgtgggaaattccaaagaagagcttcagcatctttatgatcaagcggagtttcctatcttattggcgaaccttttcgataagaatgatttgaaaccaccaaaatggcggcaggattaccagatcatcgaaacgaatcaagggacgaaagtcgggctgattgcttttacggcaccctttcctttgacctattcaccaaacggctgggatattcgtgaacccttggaattgctgcctttattgatcaatcatttgcagccccaagtcgatattttagtcttgatgagtcatttgggaatcaatgcagatcgagcgatcgcggctgagtttcctcagttggatgtgattttaggctctcatacgcatcacttattcgagaccggcgaaatcgtcaatggcgtacaattggcagcagcggggaaatttggcttttatattggtgaagtaacgattacgttagatgatcaagggcaaactatcgagcgttctgcccgagtgatccctacagagcagcttttagcttttccgcaagatgaagaagagattgctggttatctttctattggtcatcgtttgctgaaaacgaaacaagtcgcacaacttccgtgggcgcttcgttgtgaagggaacgaagattcgattatccaagaagcattggcggcgctttgtgttagaggacaaacggaagctgctgtgttgaatagcggtttgtttttaggtgatttaccggcagggcgcatcgaccaggatcaactgcataccatcttgcctcatccgatgcacttgattcgagtgacattgaagggagcagatgtgatccgttttgttttagaaatggaaaaaaatcggcgctttttacggaactatccaattgttgggatgggatttcgtgggaaaatatttggtgaactggtttataaggggatctcttatgatgccatcaatcaccaagtattgtggcaaaacaaagtaatcaatccggtggaagaataccagatcacattagtggatcattatttgtttattcctttttttcccacgatcgagatagccggacgctgtgaatttttatttccagaatttattcgtacggtctttggcagctacttagcacataaatatccgatccagtaatgaaaaagtcggaggggaatctgatacaagcacgactatcattacgtattaaaacaaggtataatagacaacaggtggtgaaaagatgaccgaaaaacaaacaattacagacgagatcacttcggtactcgaggagatcatcgaagaaccagagaaacagccgcaaaaaggcgaactggttacgcttgttaatgaagatgaattattgatcggtacacgccaatacaaattggtggtagattatcgcgaaggatttgatccccaaaaattgggcgaacggtacagtgaagtattggctcgctacgattacatcgtaggggattggggttatgaacagttgcgtctaaaaggtttttttgacaaagacaatcgcaaagcattaccggatcagcggatcgacatgctagaggattatttatatgaatactgtaatttcggttgcgcttattttgtaattcaacgagttggcggcaagaaagaaaagagtacgacccgacgccgtaaaaagaaaccagcagctcaaatcaatcaaacacgtccggcacacatcgatgagaaacaagaagttgtttctcaaaagcaggtgaagccaacgattaaaaatcgaaaaccaaaagaaaaaaaggcgcgatcgacagaaacgacagtgaaaaaaacaaataaaaaagaattcacgatccgtcaacgggaagagtaatttatgaaatataagggatatttgattgatttagatggcacgatctatttagggaaagagccgataccagcaggcaaacgcttcgttgaagctttgcagaaaaaggaattgcctttcctttttgtcacaaataatacgacccgcagtccagaaacagtcgcacaacgattagcggatgaattcgccattcatgtggcgcctgcaacaatttatacggcaagtttggcgacgatcgactttatgaaagaccacggtcgcggcaataaagtctttgtgatcggcgaagcaggattgatcgacttgattttagcggccggttttgaatgggatgaccaaaatccggattatgtcgtcgttggtttagacaatgatgtcacctacgaaaagtttgtcttagccacattagcgattcaaaaaggggctacctttatcggcaccaatccagataaaaatatccctaccgaacggggattgttacctggagccggttctttgatcgcaatggtggagactgcgacacagacaccgccgattttcatcggtaaaccggaagcaattattatggacaaagccgtggcacaccttggtttaccaaaagaggaagtcattatggtgggagataactatgagacggatatttgctcggggattcggaatggcattgattccctattggtactatccggttttacaccgaaatctgctgtgcctcgtttaccggaacccccaacttatgtcattgattccttagatgaatgggattttgaccaatgagaaaacaagtatggatcgagcggctagggatgctgtgtttgtttttatttctgatcagcttagcaattacggtaacgatcaattttcgctggctatatcattttgatattcaacagttgaatattttagattataccgacatttcaaaagaagaattgataaaaaattatgggttgttgctggatttcttgaacaatccattgaatacgacattagctttgccagattttccgatgtcagcggcaggagctggacatttctatgatgtgaagaaactatttttattaaactatggtgtactgctcgtaacgttgatccccagtttcatgcttcttagatctttttggaaaaatgaccagcgctggcggttgttgcgaccattgcagtgggggatgctgctgccgattttctttggtttcttgatggcaatcgggtttgatcgattttttgtgacgtttcatgagattttcttcaataatgacgattggctttttgatccagtaacggatcccatcatcaatgttctgccggagacgttcttcatgcactgttttattttattttttgtactgattgaactgtttttctttgtgatttactggtgggcaaaacaaagtcaaaaaaagactatttcataagtgagaaaagacctagaggatagcgggaacgtcagtcatactggcgttccttgctagtatcgcgtaacgatttacacggtagtcccttcaggtgtttcagacttgtgggatagtcttttttcgatagtagctgatttttacaagtttattgagtgatgtaatgagacttgcttggatgctggtgcgccaaacgactagctgccgaagctgcgattgcacctacaatatcatctaagaatgtatggacccgggggccttcatgactgtttaattcttttaaaatacctggcttcactttatcgatgtagccatagttggtgaaaccgatcgaaccgtagacattgacaatggaaagtgccaaaatctcatcgataccatacaacccttcatcatctttgacgatttcctgcaatggatgcaaaaggctgttttcttctgccaatatatctaactggataccagtcaaaatcgtgttgtgaacctcacgtttactgaggactgcgttcacactttcaatgcacatatctaatgtaataccttcgatataatctttttgtaaaaataaaacaagttcgccgatatcctgaagtgatacgccgcgctctgaaagtagttctcttgccttatcttcaagtgttttattctctaataccatgtgattccctccaattcttttttcttacttctatcctatcttatcttgcccgtggaatcaaaaaataccgacgaacagcaacgtagtcgtttctgaactgtatgaaaaaaagtcgcagagaaatcctgcgaccgttctttttatagcttttttccttttttatactagctcttttttaagctgttttttaatatagtagtttttgctttttttggtttttttaatatagtagtttttgcttttttggtaagtagctttttttgcaattgttgttttgcggcaactgcccaagggtgggccactagcaaatcaccagcaaacagccagtcaagataacataatgctgccgcttctaaagagttatcaagtgcagccagtagctcctctaaaaaaggtgccgcatctgcgcgatcccattcgattttatctgctaggaaaacaatgagatccagctttgaaaaattttccttaagtgtcgtgtggcaggtaatggcagacaaaatctcagggtcagtgatcccaaagagctcttttgccaaagtagccgattgtttttgatgcagcaataatggtacttttctttcttccggcactatctccaaaccgtaatattcttgaaatgcgagacgttcatcattgggaatgaccacgctgatatcatgaaacaatccagcaatcgttgctttctggcagtcgccaccgaaacgtttggcaagttgctcagcggcattggctacttcgagatgatgttggacagtcgatacttggtcaaaggcttctaagtaaacacgcatttggtttgcaagggacgcatcaggtaaatcaattttataccgactcagcatggtctactccttgaacaaactagtgctgtgggcaggttgtgtccggtttttaggatcaatgtaatgaagcgcattgttgacggcagtgggggcttccccgaaaccagtagcaatcaaatctactttgccatcgtataagaccacatccccgcaagcgtagattcctggaatggatgtccgcatatctgatgtaacgaatacgccttgtcgagtgctttttagtccccactctttaatgttcaaagtcgaagaaaaaccgtaattaacgatcaaagagtccacttgcaaggaaacagattcatctcctttgacttgctgcaaagcaatttcagttagacgtttttctccactgatatcctggataacatagggagttagaatgttgacagaagaagcgcgcagtttgttgacactatgttcatgcgctcgaaattctgggcgacgatggatcaaataaacttcactagcgattggttcaagcatgagcgcccagtcaatcgctgaatcgccacccccagcgatagcaactttgcggcccgcatacttcatcaagtcagttacgaaatagtcgagtccattgccttcaaaacgttcactgtcgggtatagacagttttcttggctggaaggaaccattgcctaaggctaaaatcactgctttggaatagtgattgcctttatctgtgatcagttctaggtagtcttcgtgcttttcgatctgtaagacggtttcctccaaacagtattgatgattgaaggtagtcagttgcttttcaagattttgaaccaattcaccggctttgatctttggataacccggaatatcatatatatatttctcaggatagagcgtggccaattggccgcctagctgaggcagactgtcgatcagtttggtttttgcgttgcgcataccggcgtagaaggcagagaacatgccgctcggcccagcaccaacgatggtaatatcatatatctccatagtgcatctccctctgttgattgattattctacagtatcacctggacgaatagcttcattatagcaaaaattgtcttaactagcattttttcatttttctgctatcattgttttagtatttagtataaacaaggaggcgttaagtgtgtctgaatttccacagctacatttaaaagaaacaggtcataaagcagttatcaaaacgaatcggggagatatcacagtagtgctctttccagaattggccccaaaaaccgtgaaaaacttcgtcgaacttgcccaaaaaggatattacgacggtatcattttccaccgcgttattcctgattttatgattcaaggcggcgatcctaccggtactggtatgggtggcgaaagtatttacgggggcagcttcgaagatgagttttcaaaagagctcttcaatcttcgcggagcattatcaatggctaatgccggcccaaatacaaacggcagccaattctttattgtcaacaatcaaaacgtaccagcgaatatgcttggtcaattagagggagcaggttatccttccgaagtgatcgaagcatatcaacaaggtggaacgccgtggttagacttccgtcacactgtttttggtcatgttgtagatggcatggatgtagtggacgaaatcgcaaacgttcaacgaggaccgcaagaccgtcctgttcatgatgttgtgatcgaaacaattgaaatcagtgcataaaaaagaaccccgcggggttcttttttattgtttcagttctgtgaatgcagcagcaatttgcaggagacctttttgcagcgtttctcgaggacaagccaagttgatccgcatatgttgcgttccggatgggccaaagttgatacctggattcaagaccacttttgcttctttgatcaatttgcgttgtaactctcggtcagaaagaccgtaggcagagaagtctagccacataagataggtgccttctggcttttgaaacttgatttcaggtaatttttctaccaaaaactcacaggtccattcgatattggctgaaagatagttaagcaattcatccagccatgcttctgactctcgataggctgcttctgttgctacaataccgaatgtattgatttcactttgaacatttttttcttgaacagttatgaattgttttttcaaatccggatttttgataaagatcattgaatttttgatgccggccaagttgaatgttttggttgctgaagttaaaacaatggagaaatcagcaaaaacaggatcaactgtctgaaatgaaacaaatgtattcggagcaaaaacgatgtcttgatggatctcatcgctgaccacgagaacatgatgtttttgacagatcgacccaattgtttgcagctcctcttttgtccacacacgaccaccaggattgtgtggattacacaaaatcatcagtttgacatggttatctacaatagcagattccattgcaacggaatcgatttcgaaatgcccgtttttttcgatcaacgggttgcgcacaagttgacgctgatttttttcaacaacgtcagcaaatggtgggtacactggatcatgaatcattacactgtcgccttcattggtatagctctgcacagctaatgcgagactagggacaacaccactgttgaacaaaatctcctctttttgtagcgagtagttgtgttttcgttcttgccaagaaatgattgcttcgtacaaactttcagggaaaacagtatagccgtaaattccttgatcaatcacttgctgcagggcattcttgaccggcttaggtgccaaaaaatccatgtcggctacccataacggcagtaaaccttcttccttataggtcgtagcaatactgtcccactttacactattggtatttaaccgtgaatggacattgtcaaaattcgtcatatgtacccctcctagatcgtttttttctactacttcaaatctaacactagttcaagtataataaaagatgaaaagagaggaaatcatatggactatcaaatcggaactattattgacggaacggtcacaggtatacaaccatacggcgcctttgtgtcgctcgataaagaaacacaaggcttgatccatgtttctgagatccagtctggatacacgaagaatattcatgatgttttgcaagtgggccaggaggtgcgcgtacagattatcgatatcgatgaatatagccaaaaaatcagtctgtcccgcagaacattagaacaaaaatttgttcagcttccttataagcgcaaaaggtattttacgaataaaaacaaacgaatcggttttcggacgattgctgaagccttaccaaagtggacagcagaagccaaagagatgctggaaaaagaaaacggaaagagataatcgtgcatattttctgaaaatgtgctaaaattgatttacaatcagttgaataaccgaggtgggtattttgggatccaaaaaagtggcaggaacagttatgatgcacttggcaaatggctcgaaaaagtttttgatgcagacgcacgaaggtaccgcagaactggcatctacagacttctctgaagataagaccggtctagcaaatattttacaattgtttaaagacagtattcatttagacgtgacagcgatcgatcttgttgaattaaccaatggatcgattgatgctgagaatattccactttttgtttttgaaacccaagaatcaggacaagacaaacaactacctgatggttatgcgtgggaagaaccgaatgttttcagacaaattattgaagattacaaaatagaaggtatgccattcttctaatcaaatggatagaagacaactacataaaaaagccgttgatacggcttttttttcttttcagaaaatttattggagaaaaacagaaaatatgcttgaccctcagagagaataatggtaaatttatcaacgttggcaaaacacaccgacagtcaaaacctttcaaaaaaactttttgaaaaaagggcttgaccaaaacggaaacagatgatattataacgaagtcgcaaatttaagaaatcaatttgatgctgatgcagcaacaaaaaagattgaaaaaagttgttgacaaataacaattcatttgttattctaatggagtcgctgatgacgcacaggaagttgttgaataaacactttcgaaaaaaacttttaaaaaaagagttgacattcgcttgttaatctgatatgatttaaaagttgctaacgcagcgcagtagacctttgaaaactgaacaaagcaagcaaacgaaccaatgtgtagggcgcttcattatatgaagcaaaatacatgcaagcaatagctagcaaagttaattttatttgagcttaacgatcctatggatcgttcaaacaaatcattatgagagtttgatcctggctcaggacgaacgctggcggcgtgcctaatacatgcaagtcgaacgctttttctttcaccggagcttgctccaccgaaagaaaaagagtggcgaacgggtgagtaacacgtgggtaacctgcccatcagaaggggataacacttggaaacaggtgctaataccgtataacactattttccgcatggaagaaagttgaaaggcgcttttgcgtcactgatggatggacccgcggtgcattagctagttggtgaggtaacggctcaccaaggccacgatgcatagccgacctgagagggtgatcggccacactgggactgagacacggcccagactcctacgggaggcagcagtagggaatcttcggcaatggacgaaagtctgaccgagcaacgccgcgtgagtgaagaaggttttcggatcgtaaaactctgttgttagagaagaacaaggatgagagtagaacgttcatcccttgacggtatctaaccagaaagccacggctaactacgtgccagcagccgcggtaatacgtaggtggcaagcgttgtccggatttattgggcgtaaagcgagcgcaggcggtttcttaagtctgatgtgaaagcccccggctcaaccggggagggtcattggaaactgggagacttgagtgcagaagaggagagtggaattccatgtgtagcggtgaaatgcgtagatatatggaggaacaccagtggcgaaggcggctctctggtctgtaactgacgctgaggctcgaaagcgtggggagcgaacaggattagataccctggtagtccacgccgtaaacgatgagtgctaagtgttggagggtttccgcccttcagtgctgcagcaaacgcattaagcactccgcctggggagtacgaccgcaaggttgaaactcaaaggaattgacgggggcccgcacaagcggtggagcatgtggtttaattcgaagcaacgcgaagaaccttaccaggtcttgacatcctttgaccactctagagatagagcttccccttcgggggcaaagtgacaggtggtgcatggttgtcgtcagctcgtgtcgtgagatgttgggttaagtcccgcaacgagcgcaacccttattgttagttgccatcatttagttgggcactctagcgagactgccggtgacaaaccggaggaaggtggggatgacgtcaaatcatcatgccccttatgacctgggctacacacgtgctacaatgggaagtacaacgagttgcgaagtcgcgaggctaagctaatctcttaaagcttctctcagttcggattgtaggctgcaactcgcctacatgaagccggaatcgctagtaatcgcggatcagcacgccgcggtgaatacgttcccgggccttgtacacaccgcccgtcacaccacgagagtttgtaacacccgaagtcggtgaggtaacctttttggagccagccgcctaaggtgggatagatgattggggtgaagtcgtaacaaggtagccgtatcggaaggtgcggctggatcacctcctttctaaggaatagtacggaagactacacatcgtttgcctttgttcagttttgagaggtttactctcaaaatagtttgttcattgaaaactggatatcgaagaaaatcaaaacaagtaacacacaccgagttgacaagttaaagagttttttaataagttcaacgcttattttcttgagcaaccttctatcgctagaagaagtactcaccgaccgtaaggtcaaaggttaagtgaataagggcgcacggtggatgccttggcactaggagccgatgaaggacgggactaacaccgatatgctttggggagctgtaagtaagctatgatccagagatttccgaatgggggaacccagcatcttttataggatgttacacagttgtgaatacatagcagctgtgaggtagacgcagagaactgaaacatctaagtacctgcaggaagagaaagaaaattcgattccctgagtagcggcgagcgaaacgggaaaagcccaaaccaacaagcttgcttgttggggttgtaggactccgatatggtagttgaaacagatagtcgaaatacttggaaaagtatgtcaaagagggtaaaaaccccgtagatgaaatctggctcacacctaggaggatcctgagtacggcggaacacgaggaattccgtcggaatccgggaggaccatctcccaaggctaaatactccctagtgaccgatagtgaaccagtaccgtgagggaaaggtgaaaagcaccccggaaggggagtgaaatagatcctgaaaccgtgtgcctacaacaagttagagcccgttaatgggtgatagcgtgccttttgtagaatgaaccggcgagttacgatagcatgcgaggttaagttgaagagacggagccgcagcgaaagcgagtctgaatagggcgaatgagtatgttgtcgtagacccgaaaccatgtgatctacccatgtccaggttgaaggtgcggtaaaacgcactggaggaccgaacccacgtacgttgaaaagtgcggggatgaggtgtgggtagcggagaaattccaaacgaacttggagatagctggttctctccgaaatagctttagggctagcctcggaattgagaatgatggaggtagagcactgtttggactaggggcccatctcgggttaccgaattcagataaactccgaatgccattcattcatatccgggagtcagactgtgagtgataagatccatagtcgaaagggaaacagcccagaccaccagctaaggtccccaaataactattaagtggaaaaggatgtggggttgcacagacaactaggatgttggcttagaagcagccaccatttaaagagtgcgtaatagctcactagtcgagtgaccctgcgccgaaaatgtaccggggctaaatagtttaccgaagctgtggagtgcaccgtaaggtgcattggtaggagagcgttctaagggcgttgaaggtagatcgtgaggactactggagcgcttagaagtgagaatgccggtatgagtagcgaaagacaggtgagaatcctgtccaccgtatgactaaggtttcctggggaaggctcgtccgcccagggttagtcgggacctaagccgaggccgacaggcgtaggcgatggacaacaggttgatattcctgtacccgttgtttttgtttgagcaatggagggacgcaggaggctaagaagtgcagactgatggatatgtctgttcaagcagtgagtcttagtgggagtcaaatgcttctacttttaaggacaagctgtgatgaggagggaaataatagtaccgaagcttctgatgtcacactgccaagaaaagcttctagtgagaaaacaatggcccgtaccgcaaaccgacacaggtagtcgaggagagcatcctaaggtgagcgagagaactctcgttaaggaactcggcaaaatgaccccgtaacttcgggagaaggggtgctgctctaacgagcagccgcagtgaataggcccaagcgactgtttatcaaaaacacaggtctctgcaaaatcgaaagatgacgtataggggctgacgcctgcccggtgctggaaggttaagaggagtgcttagcgtaagcgaaggtacgaattgaagccccagtaaacggcggccgtaactataacggtcctaaggtagcgaaattccttgtcgggtaagttccgacccgcacgaaaggcgtaacgatttgggcactgtctcaacgagagactcggtgaaattttagtacctgtgaagatgcaggttacccgcgacaggacggaaagaccccatggagctttactgtagtttgatattgagtgtctgtaccgcatgtacaggataggtaggagccgtagagatcgggacgccagtttcgatggaggcaatggtgggatactacccttgcgttatggccactctaacccgcagcccttatcgggctgggagacagtgtcagatgggcagtttgactggggcggtcgcctcctaaaaggtaacggaggcgcccaaaggttccctcagaatggttggaaatcattcgaagagtgtaaaggcagaagggagcttgactgcgagagctacaactcgagcagggacgaaagtcgggcttagtgatccggtggttccgcatggaagggccatcgctcaacggataaaagctaccctggggataacaggcttatctcccccaagagtccacatcgacggggaggtttggcacctcgatgtcggctcgtcgcatcctggggctgtagtcggtcccaagggttgggctgttcgcccattaaagcggcacgcgagctgggttcagaacgtcgtgagacagttcggtccctatccgtcgcgggcgttggaaatttgagaggagctgtccttagtacgagaggaccgggatggacttaccgctggtgtaccagttgtctcgccagaggcatcgctgggtagctatgtagggaagggataaacgctgaaagcatctaagtgtgaagcccacctcaagatgagatttcccatttctttaagaaagtaagatccctgagagatgatcaggtagataggtcagaagtggaaggccagtgatggttggagcggactgatactaatcgatcgaggacttaaccacgattgaaaaaagcaaggaaactcggaagagttttgattcttcgatccagttttgagtgagcaatacttactcaattgaatagtgtggtggcgatagcgagaaggatacacctgtaaccatgccgaacacagaagttaagcttcttagcgccgattgtagtgaagggtttccctttgtgagagtaggacgtcgccacgctgtttcattccggcatagctcagttggtagtagcgcatgactgttaatcatgatgtcgtaggttcgagtcctactgccggagttatcgatagctgtgaagctatcttttttttgccattttggagcggtctttctactagcggaaagatcgctctttttttgcagataaaagttaaaactattttgaggaaccaaaagatcagtcgatttgtcgaatgtttcaaaaaagaagcgtttgcgggagagtcctttttttcctataataaggaaaaggggagatgacatgaaacaacaattattttttgatttagatggtacgatcattgattctagcgaaggaatctattcttcgattcgctatgcactggaaaaattaggacatgaacctctctcaaccgatggattgagagcctttgttggtccaccactgattaattcttttcgtgatctaggctttacagaagagactgcgcagcgtgctgtgaaatattatcgggagaattatcgagaaaaagggatgtttcagattacgccttacgaaaaaatcgaaaccactttggctgaactttcggaaacacatgatgtcttcattgctacgtcaaaaccagagatattcgcaaaagaaattttaagttacttagattttacagattacttcaaaggaatttacggagctgatcttgaaaataagcggggagaaaaagcggcagtccttgcatatgcactagagaaggcggatggcaatacaagtgccttaatgattggtgatcgaagccatgacattctaggagcaaaagccaatgggttatccgcgatcggtgttctttatggatttggtagtgaggaagaactactttctgcaggagcagtcgccttggcagaaaaacccctagatttgctggaattgatcagaatggatcatgctggaaaataaatgcaaaaaagagcttagaacagaggaagaaaggtgattatccccgcgatgtttgattagtagcgggacttacttcgactcttttttaagctcatgaatgttatttgatggtagtagtttttaggactaagacgttattatccagatagccactctcatttttcaaaacgagggtgccggaagtcggatgcaccattaactcgaggtgaccagttaaaaacattgtgtcgtactcagaagtatagaaagtaaacaaattgctagggatctctaatgtaaaaggaacaatgatttcttcaataggtgcgatcaagaaacgctcgccaatcatacagcagccttcagcagaggaaaactggttggaaccatcattggctgtcaagataaattgagttgtaccttgtggaagacgttgtgctgcttctgtggtaatcgttagctccatttctagtaccttctttctataaaagcaattgctatttttctttgttggctgattgacttgaacataaaaaacttataaacagataacgaaaagcattggaccagatagttagcttggggaagacgactaaaagggcacactgcttcttttgttattttaacatggaaatgctaagatgcaaagactcaggtgttatttcgttcctatcgtagtaagaagtaggctatcaatccgagaatcacgaaaaaaagaccaatatacagaataaaagttaacagggcttgaaagaattgacgcattgtcttcacctcaaatcagttgttcactatgattctagcatgaaagagcctgtttgaatgaaattctagaaatctttgtagatgtttaaggtttattcatgggaaatgaagtaaaaaaacatatattgcatgcaattggaacagaaaaaataaaaataacaaagcagttcattcatgaatctttcagctgtcacttgaatgtggtaaactaaagaggaggggataaaaatgttgcgtacatgtcaaaatgttctcgttgcgttagatggttctgagcaatcagaaaaggccttttgggaagctgtcgatatttgcaaacgaaacaaagccaaactgtatgtcctttcaatcattaacaatgcagagctttcaacgagtgcttattctttttcaaagctatttgaacaggaaaagacgagggttgaaaccgagatgctaaagaaaatctatgatgcaaataaccatggtgtcgaagacgttgcggtgatcgtagaggtaggagaccctaagcgatttatcatccatgcagcaacagaaacttatccaattgatctaatcgtgattggtgcgacgggtaaaggaactctcacaagagctgtagtgggatcgacaactgactatgtcgtcaaccatgcaaaatgttcggtatttgttgtgaaataaactattgatttgtttgatcaaaaaagggaaatcaggtaactgctgatttcccttttttatttgatgaagttttggataacgtaatctgataggtctaagttgatttatcagataggaatcacacatggtgaatacaacaaaatctagtgcagttgtactatatctagttgatatagatttgagaaaaacttttatatttttattcagacatgaggaaagtattatggacagcagtagtgtatctatcgatgattttagatttgattcttttcaatcaagcaattggatttgtttgaaaacaaaataatattttttagcttcaatgatagtgctgttttgtgattatatctataatttgtacagatttctctttattttattgctagaatttcatcccgccatgaagtaaaattttagttgcatacatactatgtgaaaaacgaaggaaacagattattttagtatcagaatggtggagaaaaatgactacaaaaatttggaagcgcttcaaaatagagttctcagtttatgtcggtattggtgtagcagtttctttagtaagtgctattaatgtgttttattttcaaaagttgctagatgcatttggtcaaagcatgcctattctaaatctagtgatttatggattgacaattatcttcgttccaatattttcttatctagaacaaaagcctaaaatgaaactccaaagtggtattttcttttatttaaaagaaatggcattagacaagattagtagaatttcctattcggaatatctaaagattggttcgggctcgcttttgcaaaaagttgaagctgggtcaagcgctggtagaaacattcatttaaacttttacggaagactttttagagagttaataccagaaactttttttaatttgttttttatagcgataatcgatttaaaattagttccagccattttaatcggctacatttttatctttattgtaaccaagtatttgttgaaaatattaaaagctataaaagaaaactcactaatctctgaagaaataatgaataatactttaatacgtggcatcacagaaatggttacttttcgaataaataaacgctataaaaaagaaatagctaactatcacgaaatgtcaatttctacaacaaacaatttaataaaaatgacaatgatacatgaatttttctttggcttttttgcttttctagttgcggtcattaaattagtcatcgttatattaacatttgcaaacgttatatctattagtttaggtggattagtcgcgttggttacttatgtcgatagagtttatacaccaattgctatcttcaatgtagtttttgtccaatatcatttggataaagttacatatcaacgattacaagatttttatgatacttcaaatgatgaaggcctcttcatcgaaggagcacctatacaatccatagcaactatcagtctgaccaatttaaatttaaccattcaaaacaaacgaatattgaaagatttcaatttagacttagagaaagataaaattttggacttgttggagaaagtggagctgggaaatcttctttgatgaaagttatattgggattattcaaacccactagtggagatatttttgtgaatcataagaatttatcttcgtataatttaaatgaatactacgatcatattttctatctctcacaagatgctcctatttttcagggaacattaaaagaaaatattgtttttgacaaaaatataccagatattcaagtaatagaggcactagagaaatgtcaattaggacatttttatcattcacttgaagaaggattagatacacgaattggtgaaaaaggttctaatatttctggtggagagaagcagcgtattgcgtttgcgagaatgttcttttctactgcagagataatagtgatagatgaggccacttcggcattggatgaatcaaccgaagaaaagttgctcaaagaagtaatgaaaatatttaagaataggatcgtccttatgattacccatcgtccgaaaaaccttgaaattgttgatgaagtaatcgtacttagtaatggttataaaatcagataagtgatttcaccgtatacggagtaaatagactaactacgactaactggagagcagcaaggtctgaatacgaaataagctgggaatgtttatgctagtttattttttctgcaataactctccattttcctgttttccgtaactatttaatttcccacttccaactaatttcccacacgtactatttaaatagtttgtagttgctttattcaaggcaggtgttcgtatattttctaattgaagtgtcgttttgttttttcgtattttttcctaatttaagggaaataattgacttttataaatgataaagagtacaattatgaaaaataaaacgaaaaagaggaaaaaatatgaaaaatgttctaaaagaaaataagcaatttgtattaataaccagtctattagttgttattggctctttaacatcaatgattactcctctattcatacaatattttaatgaaaataagatcaaactaacctatgagataatgctctttatagttatagttatgttgttttctttcttattgcagactttcatgctcgtgtatagagaaaattttgcagcaaagtttaattcgaattatttgttcaaactgataagtaagctgactaaaatttcttatgatggttttattgaaaaagaacccacgtatttaattaatcgtatatttacttcagtggattctttatatttatttttgattaatagtgtatcgactatagtaaagtcatgttttgtaattttgttatctctaggaattgttggatttatatcatggaaaatttttttgctcttattgatattacttcctttaaatttagttggctttaagcatattaacaagcaattatctattagaatggaaaaaatgcaaaaagatgctgcaagtgcaaataaagatttaattgtgacattatcaaatgtggataatataaaatcccaagctaatgtatctgcagggagcgtcaataattttgtgtaaatgattcttccctactgcagattgtttctaattctcaatcagttggcttagcatttgttcaagttcgccttcggcctgttgaaagcctttatgactgcgacctaggaatttttggttgtaagtatcaaaagacgagactaagaaacgttccatcgactcttcgttttggaactgttccttgcggtggctgtatttcttgatttgcttattaaaggattcaatcaagttcgtagaataaatactcttgcgtatggccaaggggaaatcatagaaagtgagcaagtgatcgttcgaaagaatcgattcaaccacttttggatagctggttttccttttttccgcaaaagcaccacgtgcttccaacgccacctctttagatgaggcttgatacaccattttaaaatcatcacagacttccttacgatcatcgacacgcactttgtgactgatattacgggaaacgtgtacacaacaatgttgaaaacgagctttgggatagaaccgactaatcgctcctaccatcccctttaagccatccgtgatgaacaggaggacatttttcaaaccgcgctcttgaaggtccaataaaatttcctcccaaatcgtgatggattcagtcggtgcaatcgcatagctcaatacttcctttgatccgtccgggcaaatgccaactgcgatatgaatagcttccttggcgacggttttccgctttaacggaatatacgttgcgtccatataaatagcagcataacggtcatgaagctcccgccctttaaacgccgttacctcttctgtaaatgattttgttatattggacatggtttggggcgtgtagtaatgcccatacattttctcaatcaagtctgcgatttccgacatggtaataccttttcggaagaggtgaatgacggtctcctctaacgtgtcattcgtccgtctataagcaggaacagtctgttgcttgaactcaccattgcggtcgcgcggaatctggagatgaagttccccatactcggtcttgaccgtacggtcataggagccgttacgagaattacccgtgttaaaaccaatgcgatcatacttttcgtaatctaggaaagccgttaactccgttttgagaagcgtattgactgctttctccaaatggacacggaataattcattcaaatcgcctttgttcgctagagtctttagaatttctgtagtaaaatcgttcatagggaagtcctcttttctgtgaatgtgttgtggtaactctattctacagaagggacttccttttttctatttacacaaaatattttacactctctatctgcattagaacatctgcttaaaccaaagatgattgcaatgtatgattcattagcaaataataataaatatgcacaagttactagtaatgctattgtctttattaatcaattggttcaaaatatgacttatatttgggcgagtatattaattgttcaaaatgaatttcctgtgggaaatttaattattctaagtattgttattccaatgtattattccgctttaagtgatttatctaaggcaaatgtagattataaatctttaactatttctaatgagttcattaagaataatcttgacttattacgtgaagaaaatggggaaataaaaatacaaaatataaacaatattgagtttaatttcccatcatttttaataaataaacaaatttttaattataatttaaaagaagtagtgaataaaggggatatagtttatatagaaggagattctggtagtggaaaaacttctctattgagactgatgttgaaatttagaaaatctaaaggaataaagatcaatggattagaaattaacagcttggaaaattcaagtttaaggaataaaattgcttatatttcacaagatccaacgattttgtctacgtcattagaaaacaatataggaatgggaagaaaactaaccagagatgaaaaatatttgattgaaacatctggtattttaagtccgatatttaaagaaaagcattgggatagtgtattattagaaaatggtgcgaatttatctggaggagaaaaacaaagaattgcagtatgtagattaattatatctgatgcagaattatatattttagatgaaagcattagtaatatagataaagaatctgcaaatgcaatattgaatttcattacaatcaaatcacaagagaaaattattttatatacaacccatgataaatcattcaagaaatacgcgaacaaaattattaatgtaaggagataaactatgaatcacgatttgctaagtgtatctgaagttgcggatgcattgggagtaactacaagaactattagaaactacttgtctgatggtaaattaaaagggcaaaagattggtggacaatggaaatttttgaaatccgaagtgtatcgttttataggtcagtcagttgagaaccctgttactaacttttttgaaaacgagaatcattttaaaacgggttcaatactcgtcattaatattccaatctctagtatgaggttagttgaaaatttaaaaaatgatttgttgaatcaatataacaatgtatacgatggagaaaaccgacagttcttttatcaggcaatttctaaagaacaagccagagtaataatacaaggccctatagaatacgtagctagttttggtgactggataaataataggctaagaagttattcttgagaatcattgatatttatgattgttcaaatgaacataatgaacagtgtgaaatagtgatgcaatgcatggaccgtttatcattttcgttgttgaaataaggagcaactgaaaatcatcggtgctaactgcaaacaaaaaaacaacgtcccaagaacgttgttttgagaaagccacttgacgggcttgaaccgtcgacctcatccttaccatggatgcgctctaccaactgagctaaagcggcttgttatttaacacaagatatagaatacctgaaagcctgctgtttgtcaattccattttttcaagagtactgggattttttgtcaaaaaaggtgaacaacaagacaaagaagcaaaaatttcttttttcacttgccaacttatctgaatatttgctatattacaggtagattcttccggcatagctcagttggtagtagcgcatgactgttaatcatgatgtcgtaggttcgagtcctactgccggagtcataaataaaacgtccccattgatgaaaagatgatggatgggtaaagcaaacccccctgaaattcaggggggttgctttatagatagattcaacagtttatctccttgcggctacttgttttttggataagcaaagcagtcgacatagggaagtcactttatttcagagactcgatagttgtctgctgctttacgatgcttatatgttgacctaccccacagtgatttattggaaaatgactcattcgactattgcgcaagtcaagacccagtttccttaaaaaggtgtccaaagtggataaagaagatgagagggattctatggacaacagcattacatttacaaatagaaatgaatttcgtgactggcttcaagagtatggtgtatcaagtgaaggggtttggcttttgatcggaaaagctggcggtcctaagacgataaaggctcacgaggcacttgaagaagcgctttgttttggctggatcgatggcgtcatgcaaaagattgatgataaaacatacaagaaatactttgcgaggcgcagaaagaacagcaagtggtcagaaaaaaacaaagcactagctgaaacattggaaagccaaggactaatgactgattatggtcgaagaaaaatagaagaggccaagaaaaacggtcaatgggatgcggttcagtctccaaagatttcggaggaacaaatctataccgtagcaagcttattaaagaaacatgaggcagcttatacaaatttccaagcaatgtctctctctatcaaaaagacctacacgcgggcatactatgatgcaaaaaccgacactggacgcgaaaagcgtttgtcttggatgattgaacggctagcgaagaatctgaaaccaatgtagcgatttttgggactgtgccataagtctcctacaagtaacactatccgaacattaatgattattgctcctgcggtgcagggactcctcgtcgcaaaagtcagaggaatctatcctagcaacagactattattcggtttaacttgttggatgatgacatatggcacagtcctgatagctaagaagcatgaaaaatcaagcgaagcgactcgggcaatttttactaattgcaggtgtcgcttcgcttgtttgtcttgcttgctaaatatcttcttattgcctactgaagcttttgctccagagtctcatacagtttgacggtctcagaggcgtctttgttcgtatagtagatcgtgatatcggctgtcgagagccgaagaatgggttgcgatcgtttgtccatgaatagtttcgcagattgaccagcaacgttaaagttgcctgtcaggtaatgatctgtcgccatccccattgtgcgaaccgttggctctggaagtgtatcaacaagcgtgactgttctgatttcatccaacggaatcgtttgtcggctagctaatggggcatcaaactgtacggattgatctgtcatctctccacttattgcatcaggattaaaatctaattgatacaaaggaacgatagtgacaaccatgatcgcgatcatcagaatgccggtgccgattgctaaaccttttccggtctttttgcctaagttgataccgatattcaaccccacgcggtcagggacaaataatcgaggatctgttggattaatgtacacgccataacgccaataacggtcttcatcataataccgttgttccgtagaagccaacaattgatcttgtttttttcgtaatcgcagcaatagcccaaaaggaacgaccatcaagaagaccagtaacaagacgaaaagaacagcggataactctccaactacccccgtcaactgggtcgagagcagtggaacaaaaaacaatagcagtgtgcccgtgctcattaagacgaccagaagggaccaatagaatttcgttaaatcattgaactgttgattgatttgaaaatccttcgtcaatggacgtactggtaagcggcgaatcacttgccataaatagaggaaaagcaaaaagatcaagcagttgatgaggctgaatagccaaccgggtccgttctccgcggtagggaaataaattacaccagcaatgactaataacaatgatggaagaaaactgactaatggcaacagttttctatttttttgctggatcaatttggtgtctactaaaacaggatcgatagggagtccccagttcttatgctcaattagttcgtgcatttttccaatataatgaatttgtaagacgtagcttgcccccagaagcaaaaacaagagcagccagaaaaaggtcatgaggatagagccatataaattgaacaaaaaaatcagacttgctacacttaagataccgacaaactgcataatacggcggcggtattcagcaactaacgccaaaacgtccggatgctgcaagtgatcaggagataatgtattttccaataatacgtttttgtggggcttactgagcagattcattgtaaaagcgatagaaaaaatgacgatcagatttatgccaaagaaaatgtaattcatttcaattcggtcctttcagaaaactgttctaaacattgctgaatatcggcaatgatcgctgcttcgctttttccgtgaatcaatgcagaggctacttgcagctgcagctgttgttgataatattcttcttcggagaaggtaaagctgcgaggcgctgcgacagcagttcctttgcgccgatcggtaatcagcagcccgtcttctttcagtgaattataggctttagaaatagtcatcgtgttgatgccaatctcttctgcaagttgacggacagagggaagtagttcgccgacagctaattcgcctgttgcgatcccaagaatgatttgatcgcgtaattgttgatagatgggtgtattgctttgaggtttgatttcgaattgcactggcgctctctcctttgtattatctatattaatacaaatagatggaacatgcaatcaataatcatcctctctataaggaactcacttcgcagcattaggagtaataaactgaaatttttcgttgctgttttgcaatcactttgttatcgcagtgactgaatattacggtatgcttttagttagaaaaaataaaggaggagacattatgagccactccccgaggacggcttacttcgataatgcaaaatttttattaatgattttagtggttttcagccacttattgcaaccattcattggtgatcacaagttttatcatgatctgtactattttatttttacctttcatatgccagcctttgtttttttagcaggttattttgccaaaccgctcacaaaaggttcaaaagttcgagatctggtcaaaaagtttctacttccttatgtgttttttcaacttttttatacagtttattactgggtgattggacttgacgcgtcgttgaatattcagctgctcaaccctcaatgggcattgtggttcttactcagcatgttcttttggcagctttctctcgtcttttttcagaaaatgactgccagaaaagccatcttgcttagtgtgctgctgagcatttttgctggttacctcccttttattaatcaagttctgacactgcagcggacatttgtctttctaccattttttatcatcggtttttattttcctaaaaatgagatgcagtttttacaaggaacacgaataaaaaaaatcagtctggttttcttgccgattatctatttgtttattgcgcttttccatgggatgaataagtacatggtctttggctcgaaaccttatgaagactatctgagctatccattgttcggaggaccattacgaggggtgttctttgtgattggactgctggggatcattggttttctgcgactcgtcccacggcaacagctgttttttaccaaatggggcaagaacacactgttagtctatttgctgcaagggatctttattaaaggattgagagcactggcaatcactgaactaaacttgtcactgctcggatttatggcgttgatcgtcgtcagtgttttactgacgatcctattagccagcagacctgttcggcagttctacgcccgttttgaagaagggatttcttttgtcctattgggcttgggtatcttcatgattgcgaactgaatctaaatggaaacaccgccttcgcaagtttggatctgccagacttttgctcaggcggttgttatttgatttggacaagagtaaaatgaagagaataaagtgaaaggatggagaaatatgtcagaaatttccaaaaatactactgaaaaatttgctgaagcgtatcagcaaaataacaagcaaaatgcactgcaaagaggcgtggtcaaaaacgggatcactgcttcagcagaaacgattcaaggccatgtcaacaatgtaccagtcttttcagttgatgtgacgactggcaaagtgtcaaaccaaaaacaatcaggtcgctgctggatgtttgcagcattgaacacattccgtcacaaaatgttgaatgcctttaatttgaaggactttgaattgtcacagaaccatacttttttctgggataaatatgaaaaagccaactatttttatgaaaatgtcttggcaacagcacaagagcctttatctagccgcaaggttgctttcttgctgcaaacaccccaacaagatggcggacaatgggatatgatcgtgtcgatctttcaaaaatatggtgtcgtgccaaaagcagtgatgccagaaagcagtaattcatcgaattcccgtgacttgaacaactacttgaacaaaaaattgcgcaaagatgctgggacattgcgccaattagtggcggatggacaatccgaagcagctattcaagaagcaaaagaagggatgctacaagaaatctacaatttcttagcgacttctttggggactccaccagaaacgtttgactttgaataccgtgatgaagagaaaaattatcatattgatcgcggactgacgccgcaaacattttatgacaaatatgtaggggtagatctggatgattatgtaagcatcatcaacgcccctactgctgacaaaccttataacaagtcctatacagtggaaatgttggggaacgttgttggaggtaaagaagtgaaatatttgaatgtggatatggaaacattcaaaaaattggcgattgcccaattagaacaaggagaatctgtctggtttggctgtgatgttgggcaatcttctacccgtgattctggaatcatggcattggatgcgtatgatatgaacgacttattcgatatcgatttcacgatgacgaaagctcaacgtttagattatggtgaaagtctgatgacccatgcgatggtcttgactggtgtggacatcgttgatggcaaatcaacaaaatggaaagtcgaaaacagctggggagaaaaagtcggtaccaatggattttttgtaatgagtgatgaatggatggatgagtacacctatcaaatcgttgttcgcaaggaatttttgacggccgaacaactcgctgcttttgaagcagagccgcaagtcttagctccttgggaccctatgggagctttagcataatgaagaaatgaaaagctgtgggcgtatgttaagagacgatcgaacaaattttacgaggactgagatagaaacggttcattttctatcaggtagaccaatttgtttgatggaccgtttattagctgcgctgtcacagctttttttgtccatttttatgatctttagcagaaaaatgtgaaacttattaattgtaagatcgccattctttctataaaataaaacagtcactaatgatgccacacgtctcattagagtgaactgttgaagaatggtcactgggaacctttacttccactgacagactttgtcattttacttaatgttaaaggaggagactaatgacaaatctgtttatagttattgttgtacttatttttgctgcccttatttatgggttctacctgatgcaaaagcgtcatctgaaattctctacacgagtgtttacagcgttgtttgtcgggatactttttggtggtatcttacaggcgatctttggaactggctcggaagtgatcacccaatcactagagtggatcacaatggtggggaacggctatgtagcactgctgcaaatgttgatcatgccattggtttttgtttcgatcgtcggggcatttaccaagatgaaagaaagcgaaaaaatcaaaaaaatcagctttactgtgttggctactttgttgggcacgacagcaatcgctgcactgatcggaatcgtgatggttatgttgtttggtttagacggtgcgagttttactgaaggcgcagcggagaccgcacggatcgctgagttggcagaacgttctacccaagtccaagacttgtcaattcctcaacagatcgtatcctttattccgaataatgtttttgccgatctagctgggacacgttcaacgagtacgattggagtggtaattttttctgcttttgtagggattgcctacttaggggtgaagaaaaaagccccgaaagaggcgcaaacgtttgctgatctaatggatagcttgtacaagatcgtgatgcgaatcgtcacacttgtgttgcggttgactccttatggtgtattggcgttgatgacaaatgttctagcatcaagtgatttcgaagcgatcctaaatcttgggaaatttattttagcttcttatgcagcattgatcattgtcttgctcgttcattccttgttgttagcgagtgtaaaagtcaatccaattacttatttcaagaaagcttttccagtgttaagttttgcatttacttcacgctcaagtgccggtgcgttgccattgaatatcgaaacgcaaacaaaagcgctaggtgtcgacgaagcaaccgccaattttgctggtagctttggcttgtcaattggacaaaatggctgtgctggtgtgtatccggcgatgttagccacgatcgtagcgcctacggtaggaatcaatgtctttgattggcagtttatcctgcttttggtggcggtcgtaaccatcagttcttttggtgttgctggtgtcggtggtggggcaacctttgcttcattgatcgttttaggatcaatgaacttgccgatcgcaatcgttggtctagtcatttctgttgaaccactgatcgatatggctcgaacactggttaatgtcagtgacagcatggttgccggtgtggtgactagcagtcgtatccatgaactagatcgtgcaacacttgaaagtcaaactgctgtgattgatgccgattgattcaagtagaagccgctactaaaatcaagtgataacaaaagagtgtttattaagaaagactgcgtgtggtctttctttttttgtgaccaaaaatcagagtcactattgttattatgtgtcattatggcttactctgaccgctatctttagtagatgagagaataataaagaaatattcaccgctttttttatgggtttctgctatactttttgtatacaggcgcaggagggatcaagatgacacaactgattcagttagaaaatgcagcaaatgtcagagaattaggcggttataaaacgacatcagggaagaccattaagcggaaaaaactgattcgtagtgccgcgatcaatgagctgtctgagacagatcaagcaacattgagcaactatggcatcaatcaaatcattgattttcgttcctatgaagaagccaaagcacagccagatcagccaatccgttatgcccagcagttctttttgccgatttttagcgaagatgaaacgatggtttccttatcaccagagacattgaagcaaaagctggcagatggggatgatgcagaagatcagatgaagaaggtatatcgccactttgtcgaaagtccgcatgctcgaaagcaataccgtcatttttttgacttggtattagaaaatgcggaagcaggagcaaccctatttcattgtacagcagggaaagatcgaacaggcttcggggcatttctgctcttatctttattagaggtggatcaatcaactatcaaacaagactatctggcaacgaatcgctatctggggccttttttaaaagagaaatttgcccctatggcgcagcaaatgccgcctgaagttcttgaagccatcaccacattgatgagtgcaaaagaaagttttcttgatgaaagtttagcagcgatcaaaaaagaatttggcacggtggatcagtatttaaaagaaggactggcaatcacaaaagacgaaaaagagtattttcacgcccactttaccgagtaaaggatgtgtccaacatgaatcaggaattgcttgcccagtttgggttatccggaacattaacgccgatcagcgggggtgacgtgaatcagacgttccggttgcggtcagaagaaagacagtatttcttgaagtatcatccaggagtatcccagcagttttttcaagcagaagcagcaggattggcacaattacgtccctatgttcgcgtacccgccgtttatcaatatggagataacgaacatggcgcctaccttttgctagaatggatcgatgttggtgaaggtgatcaagagtcgatcgccactgctttagctgagatccatcggcaaacaagcccaacgtttggatttgaacaggacaactttattggcttattgccgcaggtgaatcccgcggcagaggattgggtgagtttttataccacgtgccgcttagacgttcaggtggaattggccaagttaggaaatcattggaatcctcgccgagaagataagtacctaaatctgaaagaaacgctgtatcaagagtggtcaggtcgacaggttcaaccttctttactgcatggtgacttttggcgcggcaatgtgctgtttgatcagaagggtgatccagttttcattgatccggctgtatcctttggtgatcgcgaacttgatctggcgatggcgcaattattcggcggatttcgtccggaatttttccaacgctatcagcaagtcttcccgctggaaaaaaattggcaagagcgggttcctgtgtatcagttgtactatttattggttcatttgaatctattcggtgaaagttacggcaataatgtagatgagattttgagtagatattaggaggcatttggcaagatggtagcaaagtatcaaaaagaacatgaagtcgcttattatgagtgcgatatcaatcagacaatgacgtttccagcaatgttgggagtggcaatcaaagtatccgaagagcaaagtgcagtattggagcgtgggccagaatacattcgctcttttggactgacatggatcattactacttaccatatcacggtcaatcggttgccgatggtcggggaacagatcatggtctcaacacaagcaaaagaatacaataaatatttttgctaccgctatttctggctgcacgacgcccaaggaaatgaattagtgaagatcgagtcggtttttgcattgatggatttggcaacacgcaaagtcagcagtgttccagatgagatcgtcgctccttttgaaagtgagaaaatcaagcgcatcaagcgctatcctaaaatcaattccccagaaaaaggacattttttaccttatcgggttcggttttatgatatcgacagcaatcagcacgtcaacaatgcaatgtattttaattggctgctggatgttttaggctatgaatttttgacgacgcatcaagtgaaggaaataacgattcgttttgaccgagaagttgagtacgggaacttggtagaaagtcattttgaaacgattcgggatgagaaccatttggaaacattacatgagatcagaatcggagagacgacgtactgcgaagccgcaatgaagtggcatgaacgaacaaaaaataatgaaaacaactaaccgcactgacaatcgtctgttcttagcgattgaccttctcttaaaaaaggtcagttgctaagaacaagcgaaggtgcggttttttgtcagtttagtttctaaaaaagtcaacaatcagttttccataaagtcgtgtaattcaactaatggcagccgacgatttttggcgatcagcaatttgattcgggctttttgactgttgatgctattgcaaaagatgactcccatctcctgcagttcttttccgcctccagaataaccatagacaggttcggcaataccgttgaaacagcgggagactagtacgactgggatttgtttcgccagtaatttttttagcggcggtaatgtttggggtggtagattgccagctccgagggcttcaatgaccaatccatcgatattggattctgctaaggcctcaaaaagttctccatgcatgccggcataggctttaacgatcggaatcaagccatcgacccgatcaacatccaattggcgactctctaatagttcctgcatgaataatattcgattttttgtgaccagcccaatgggacctagtgttggcgtgcgaaaagttgcaacattcgttgtatgcgtctttgtgacataacgagcagagtggatttcgtcattcataacgactagaacaccctttttttgagcatcatcacattttgctacgcgaatggcactttcaaaattatataaaccgtcactgccgacttcattactggagcgcatggcacctgtaatgacgataggcagctgattgccgatcgttgtatctagaaaaaaggcagtttcttctaatgtatctgttccgtgagtgacaactacgccatcgattccacttaaatgagccaactggatgcgttctttgatttgcagcatttgctcaggtgcaatgtgaggactaggtagattaaagatatcttcaacgatcagttcaacatcgtcatcgatatggataggggcgtccatcaatgggtttgtgacgtctggactgacaccaccggtcaacacatcttctttcatggcaatggtgccacctgtatgcaaaacgaggatttttttcatttttgtcacctcaaagattattttactcataactccaaaactattgtatactaatcaaataagaaaacaagcaaggtgaggaaaaatgattcgaattggttgtacgacatttagtgaacatggttctcttgttcagagaaaaacatcaaaactttttgaatatgccagtgtctttcctgtggttgaactggatacgtcttatcattatttacccaaagagaaggatgtgcggaattggttgacgcaggtaccggataacttccgttttattcttaaagtgcatcaaagcgtaacgacacaaggtgatttgccggaaggtatgtctatggcagaagcactaacagctttcaagcaggcgattcaacctatggtggatgctggccggctttattgtttgctggcacaatttcccaaccggtttaagtgtacgaaagaaagtgtggcgtatttagatgaagtacgtcagtggtttgcagcgtatccggtggcaatcgagttgcgggataatagttggtatcagccagagttccgctcttcgatgcaagcctatatgcgcaagcaaaagttctcgttggttattgttgatgagcccaagaaactctccactacggttcctttagaaccgctagtgactaacccggcatttgccgtatgtcgttttcatggcagaaatgatgttggttggacagctaccggacctgacgccaaaaagaatcggacgctctatcgctacaatgagaaagaattaagtgaactacgtcaagcagtcgaagaaacagcggctcacgcacaagaagttgctgttatttttaacaataatgctggcggtgatgcggcggacaatgcccgcgcgttgatcgaagccatgcaaatcgattaccaacaactgaatcctagccaattggagctattttgaggagttatatgattaaagcaattttttttgacatcgatggtacattgatcgcagataacgggaaagcgatggcaagtacccgagcagcgatcaaagaagccagaaaacaaggtgttttatgtggcgtggcgacaggccgcggacctgtagaattagagaaagtcatcgattatttagatttggatatgttcatcacctataatgggcagtttgtctacaccaaacaaaatttgatttatgccaaacctttctcgaagaacatccttgaagaaattgttgcatatgcagatgaaaattatcggcaggtaatgtttggcggagaaaccaaagtggctggcagcttgacgattcgtttgagtcaatcaccagtgatgcaacgttatttgcgattcgtcccaaagaagtttcccgttggggtgctaaaaaaattgctgcagcgattcagtccaaatcgaaatgccaaacggtatcagtctctggatattttgcgggaaccaatttatcagtgcattatgctgagtcccgaatcagagaaagaaaagctaaagcaaaaactgccttcctgtgatttcaaacgctccaatgcctattcagtggatatcgtccccaagaaaggctcgaaaatgaagggaatccatgagtttttggcttatgaagggatcgcgatcgaggaagccatggcttttggggatcacgaaaatgatatcgagatgttgaaaggtgttggtattggggtggctatggggaatgcgcagcaagtggcaaagacagcggccaattatgtaacagcatctaataatgaagatggtatcgctcaggctctgaaacactatggcatcatcgaataacacataactagaggaataaatggaatacacgaattgattgagtgagatcaacggaggaggaaagaagatgagtccttttgaaatgacagaagaatttcatcaaacctttgacccgacacgtccggagcaaccacggccattcacaccagaaaaggccagtttccgtgcagggttcaaagtagaagaattagttgagtttttgtatgcagcggccaacaatgatcccgagcagttcgcacagtcagtggcggatctgcatcagggaatcgagcaagcaaaagaaaagatcactagcaaacaaaaaccagtgacggatacgttagtcgagcaagtcgatgccttatgcgatcttttgtatttcacctatggctctttttcactattgggtgtcgatccggcaccaattttgaaaatcgttcatgaagccaatatggggaaactttttccagatggcatgccccattaccatcctgtgactcataaagtcatgaaacctgcggattgggaagaacgttttgctccagagccccgcatcaaagctgaaattgaacgtcagatcgtagcaaaaatgaagagttgacttgaaacgagtgaacacccataaaaataagatgacctttgcaaaatcattcgcaagggtcatcttgtttttttgttctaagtgtatttgaggggcggctttgttgggaaaggccactgactatcaatcaaaaaaggtataatacaaagttcgaacagcggctttctcttgttctttatggataccaaacataatactgacctcggaagaaccttggttgatcatttccaagttgatgttcttgcgggccaatgcagctgtgctgtctgcagtgatccccactcgttggcgcatcccttcgccgacgactacgaccatggataagtcgtgggtcattcgtaattcatctggatcgatctcataagcgatcttgcgcagcaattcttcttccaacaccggatttaattgattggctctcataatgatcgagatatcatcgattccggacggcatatgctcatagtttaaatcaaattctttgaaaatctcaaggacgcgtaaagtaaaaccaacttctcggttcatcaagtatttacggatgtagatcatacagaagccttcatcactagcaacaccgacaactggttgtgtcaagttgttccgttggttggtaatcatggttcctggatgtgtgggattattcgtatttttgataacgacgggaatctttgcccgataagaaggcatcaacgcttcatcgtgcagcaccgtgaatccggcatacgaaagttcccgcatttctcgataagtcagttctttgatgggttctgggtgatggacataacctggatgagccgaaaaaataccatcgacgtctgtaaagttctcataaagcgtcgcgttgacaccagcagctaccaatgcaccagaaatatctgatccgcctcgagagaaagtacagatttctccatcctccgtatacccaaaaaatcctgggatcactaaaatttcttctgtttctgcccaggcattgatttttgtgtaagatgctggcaagatccgggcgttttggggttcatcagtgactaagatccctagctcctctgggtttaagtaacgtgctgctagaccggatgcttgtaaaattccggcaatcaaacgagcgttattgtcttctccactagctaagatcttgtcatgaaaatgtgggtcatcattaggcgacaatgtcagaaactgctgtaaagcactttggatctctgccaataattcaggcgccacttgaaaaggggcagcgatggcagcataacgcgcataaatttctgttaataagggacggacatcttttgatgcagctagtccttcacaagtggctaataaaagatcagtcactttggtatcgtctgcatggcgtttaccgggggcagaaacaacaacaaaacggcgttgtggatctgcttggataatatcaactactttttgcacttgctcggctgaagcgagcgaactaccaccaaattttgctactttcatcttgcattactcctgttcaagcttttttctagagtacagtgtcaaaagtgagaaatcaaggcatttcttaaaaaaggcaccaaaaaacaggaaaaagcttttttgatttcggcttttccaaggaaatttagagagagcttgttaaaaaaagaatgaaaaattggaggaagtcgcaaaaaagtcaatcttttttgccgcaatttaatgcttgatttttttctttatgctataatctagcgtagatgctttttttgaaaagggacaagtgggtccttttatttgagataccttacatacccaaaaacggatctgtgaaaacgcggatttcatacgaaaagtgtagatttgaaaattggaggaaccataaaatgggaactaatatcatctttggaatcgttattgccattgtcgtcatcgcggcgatcttatatgcgatcggttactttatgcgaaagaaaaatcaggagaaactggatgtcttagagaaacgtaaagaaaacctgtttgatctgccggtcattgaagaagtcgatgaagtgaaaaaaatgcatttggtgggtcaaagccaaaacacattccgagaatggaaccagcaatggacagatatttccacctcctcatttgcggaactggaaagccaaatctttgaagtcgaagagttgaatgaacggattcgctttttcaaagctaaaacagcgatcgaacaagcggaagcaaccatggatgatatggaacgtcaagtcgaagagattcgtgccggcttgaaagaacttcgtgaaagtgaagaacgcaattccctagaagtccaaaaagcattggatgtttatgaagatttgaagaaaaacttgcgggagcatggagaggaatttggtccagcttataacgaactgcaaaagcaaatcaaaaatatcgagattgaattcactcaatttgttacgctgaatacttccggtgatccggtcgaagctcgggaagttttagaacaagcagagcaacacacctatgaagtcgaagatttgatgaaacgaatcccagctgcttatgaagagctgaatcgtacgttccctgatcaattaaaagaaatccaagatggatacaaaaaattattggatcaaaaatacgtctttcctgaagctaacttccaagaagatatcaaccgcgtgaaaaaacgggttgaaaattctatgaatgatttagccaaaacagaagttgcttctgtggaggtagctaatcgggatacagctagtgacatcgatgctttgtatacggtaatggaacgtgaaatcaatgcgaagaaatatgttcttaaaaatcgtcaagtgattgttgactacatcgatcatgcgacgaaaaacaatcgtcaattattgattgagttggatcataccgctcaaagctatacattgaatcataatgaattaggtcgggttcgtggcttccaaacagaagtcgatgaattggctcgccgcaacaatgaatacttgccgcagttggaaaaccatgagatcccttattcagaagtacaaagtttttataaagatgcttacaaaattttagatgatgtcgaagcgcaacaagttgaaatcgatgaagcgctaagtgatctacgccgtggtgaaaaggtcgcacaagagaaagtagagaacttcgaatttcgtttacgtaacctcaaacgttttgttgagaaacagcgtttgccaggcttaccaggggaatacttagaattcttctttgtcgcaactgaccgagtggaagaattaggcaaagaattgaataaaattcggatcaacatgcaagaaatcaataaattggtttcagtttgtgaagaagatttagacatgcttgatgaacaaacgaaagatttagtggatgcagctgcattgacagaacaaatgatgcaatatgcaaaccgttaccgtcattcacatgccgacatcaaagcagcgattgataagagtttgtatctgtttacgaaagagtatcgttatcaagatgcattagatgagatcgggacagctttggaacgcgtcgaaccaggtgctttcaagcggatcgagaacttctatttcaagaatcgtgatttagtataaagcaaaagccagcagtgaaaaactgtctggcttttttagtgaattggcggattctctaccgacaaatcgatccaagaagaggaacttcttgaaagagcaggaaagagcagttataatgggaaagaatttttcaaagaaagggtcctagcattgatttattttgataacagcgccacaaccgcaatttatccgcaagcattagatacatatgtaaaagttagtcagcgtattatcggcaacccttcaagtcttcacgatctgggcagtcaagccagccgtcttttggaacagtctcgggcgcaaattgctgagctgctgcaagtttctgcttcagagatttggtttaccagtggggggacggaaggagacaattgggtcttaaaaggcaccgcgatcgccaaaaaagcttatggcaatcacttgattatttctggcatcgaacatccagcggtcagtgagaccgcagaacagttgaaagaactagggtttgacgtgagtatcgcacccgttacttctactggatttgtagatgtcgctgctttgcagcaactgatccgaaaggaaacgattcttgtttctgtgatggcagtcaacaacgaaattggttcgatccagccaatcaatcaaatcgctgaaattctagaagctcatcctcgcatccacttccatgtggatgctgttcaagcaattgcgaaggttgatcagcagcaatggttgccacaacgggtagactttgccacattttctgcccacaagtttcatggacctaggggcgtcggttttatttattggaaaaaaggccgtaagctaacaccattgatgaccggtggcgggcaagaacaaaatcagcgcagcgggactgagaatttaccggcaattgttgcaatggctaaagcgttgcgactagcacttgaacaaaaagctgcccggcctaaccatgtgggcttattgaaaagttacctttcagaagcattatctgagtatgagaaagtgacggtgttttctggagccgaacattttgcgccgcatattctttgtttctcattggaagggatcagaggagaagtgcttgtccatgcctttgaagaaaaacagatttatctctcaacgactagtgcctgctcttcccgcaagaaaatggctagcagcacattgcatgcgatgcatgtccctagtcgcttagctacttcagcagttcgggtcagcttggatgaaagtaatacgatggccgaagtagaacaatttttgattgtatttaatcagctttatcaaaagttctcaaaattaagccaataagagcatgttgcgaacataccaacgacaaacaaaggagttttactcgtgaattatacagagatcatggttcgctacggcgaattatcaaccaaaggaaaaaaccgccgcagtttcattatgcagttggcggagaatgtgaagcgaacacttgccgactttcctaaagtcaaagttcatgcagaacgtgatcggatgcatttgcttctgaatggggaagacagtcaggcaattatattgaaattgcaaaaagtgtttgggattcaaaatttttctcccagcattcgggtagaaaaagacgtcgaagtgttaaaagaagccgtacaaacagtgatgagtgaaatctatacagggactgagaccttcaaaatcactgccaaacgcagtgaccatcaattcatccaagacagtaatcagttgaatttgacgttaggaaatgctgtaattgatcgctttccagaaatcaaagttcaaatgaaaaagccagatatcaatctacgggtagagatccgtatggatggagcctacctttcttacgagacgatccaaggagctggtgggttaccggttggaacgagtgggaaagggatgctgatgctttcaggcgggatcgattcccccgttgctggttattttgcgatgaaacgcggggtagagatcgaagcggtccattttgccagcccgccttatactagcgaacaggcactacaaaaagccaaagatctgacaaagaaactaaccccttatgttggcggtattcagtttattgaagtcccattcactgaagttcaagaagaaatcaagaagcatgtgcctcaaggctattggatgacgatcactcgccggatgatgctgcgactcacagatgcgatccgtgaagctcgtcatggattgattattttgaacggagaatcactaggccaagtggcttcacaaacattgcaaagtatggtggcgatcaatgaagtaacgaatacgccaatcattcgtccggtggcaacgatggataaattagaaatcattgatgtagctcaagagatcgatacgtttgaactggcgatccagccatttgaagactgctgcacgatttttgctccgccacagcctaagacaagaccgaagttggagaaagtgcatttatatgaagagcgcttagatatagcaggcatgatggagcgggcattagctgggttgaaaatcgaagagatccaagcttccgaaaaagcagaattcgctgattttctttgatcttcacatcagaaaaaattttgatatcaggggataaaaaccagctgttgactgttggcaattaaagaaaaaagatggttacaaagggtgtgcccaagtagccgtcttttttcgtttatgctggacctgtgagagatttctcacagtcgtttgactggaatctaggaagcattaaaagtttgtgaaaattgcttgctattcaatgacgagcatgctaaactcgatatgtgaactatttaacaaggaggacggaaaccatggaagcattaagagaaaaaaaacttcctaaagcaacagcgaaacgtctgcctgcttatttaaggcatttaaaatttttggatgcatcaggtgtccatcgaatcaaatcaaaagagtttgctgagatcacacaagttccttccgcaacgattcgtcgggacttttcccacttaggggaattaggacgaagcgggtatggttatgaagttccttacttgattgaagtttttagccatatattagaaacgaacgaagcaaagaacattgcattagtgggctttggcaatctaggtaaagctcttgcaaacaacaactttcgccgcaatgagaatctttcgatcgttgctgtatttgataatgatccccaattgatcggtaagaccatcgacggtcactatgtttatggaatggatcagctagctgagatcgttcaggagaaaggaatcactgtagctatctcgacagtacctagtcaatattctcaggcggcaatcgatacgatcgtagaatctggcattacagcgattttaaattttgcccctgatcgcgtcaatgtacctaaaaatgttcatatccaatacatcgatctgacgacagaattacagacgttgatcttttttgacaatacctattctcagaaatcgtaggttttgagcaaaatcttttggctttcgcgggttctctcctatactggagaaaactgtaataggagagatgacatgcaagtaacacgtaaaggaatcatttttgaagtaccaggcattcagccaaaagtaggggatcaagccaaagaatttgaactgaaaagtttagatgacaaagtttatcgcttggctgatttcttaggtaaaccgacgatcttaagcattgttcccgacattgacacgcgggtctgtgcattgcagacgaagcgcttcaatgaagaagcaagtaagattgatgaggttaattttgtgacaatctcgaacaatacgaaagaagaacaagcaaattggtgtggacaagaagggatcgatatgctgatgctgcatgatccagaaaatacgtttggagaaacctatcaaattatgatcccagagtttggacattttgcccgcgcgatttttgtcttagatgaaaaaggggtgatccgctacgaagagatcgtgcctgaaatctctcaagaaccggactatcaatcggctttggccgctgccagatcaatcgctgtttgactttcaaaaaagttcattgtagaatgaacaagatcaattgaaagaagacgaggatcaagaggagtatcagacggactgtttttacagagagaagaccaattggtgcaaggttttcagcaggaatctgagaaggtagcttgtgagtctttgattggaacagcaaggaacaccttgttcagtagaatcaaacgcttcgtgaccgttaactcacgcccaagaggtagagaaatctacaatttaggtggtaccgcgtatttgcgtcctaaaatgcttcggcattttaggactttttttattcccaaaagccgagcggtcttgaaggaactgatcaaaaaaagtaggaggtaaaacaatgtccgataacttatcaacaaagtacaacccgcaagaagtcgaagcgggacgctaccaggaatggttagccaaagatctattcaaaccaagtggtgatcaaaaagccaagccttattcaatcgttattcctccgccaaatgttactggtaaactacacttaggccatgcgtgggatacaacccttcaagatatcatcattcgccaaaaacggatgcaagggtttgatacattgtggttaccaggtatggatcacgctggaattgcgacacaagcaaaagtcgaagaaaaactaagagaacaagggatctcccgctatgaccttggtcgggaaaaatttgtcgaccaagtgtgggaatggaaagaagaatatgcaggccatattcgtgagcagtgggcaaagctaggattgtctcttgactatagtcgagaacgattcacattagacgagggtctgtcagatgctgtccgtaaagtcttcgtaactctttacgaaaaagacttgatctatcgcggcgaatatatcatcaactgggatccgcaagcacgtacggccttatctgatattgaagtcatccataaagagatcgaaggagctttttaccacatgacttatgaactggcagatggttctggtaccgtagagattgccaccactcgtccagaaacgatgctaggagacactgcgatcgctgtccatccagaggatgaacgctaccaagaattgatcggcaaaaaggttattttgccattagttaataaagagatcccaatcattgcggatacttacgtggatcaagaatttggaaccggcgtagtaaaaatcacccctgcccatgatccgaatgactttgaagtcggtaaccgccataacttgccacgggtcaatgttatgaacgatgacggaaccatgaatgatttagccggtaaatatgctggcatggatcgttttgcagctcgtaaagcgatcgtcaaagatttggaagatatcggacgtttgttaaagattgaaaaaatgattcacagtgttggccattcagaacgaaccggtgtcgttgttgaacctcgtttatctacgcaatggtttgtcaaaatggggccattggctaaagaagcgatcgacaaccaatcgacggatcaggcagtcgagtttttcccaccgcgcttcaatcaaactttcttgcgctggatggaaaatattcacgactgggttatttcccgacaattgtggtggggacatcaaattcctgcttggtaccacaatgaaactggtgaaatgtatgtgggcttagaagcaccggcagatgccgaaaactggacacaggatcctgatgtactggatacttggttcagctccgcattatggccattttcaaccatgggctggccagatgaaaatagtgctgattatcagcgttatttcccaaccaacacgctagtcacaggctacgacatcattgctttctgggtaagccgcatgattttccaaagcttggaattcacaggcaaacgtccttttgaaaatgtgctgatccatggactgattcgtgatgaacagggacgtaaaatgagtaagtcattagggaacgggatcgatccgatggaagtcatcgaaaaatatggcgccgatgcattgcgctggttcttatcaaatggctctgcaccaggacaagatgttcgcttcagctatgaaaaaatggatgctgcttggaacttcatcaacaagatttggaatgcgtcccgttttgtcttgatgaatgttgaaggaatgacggtgacagatattgatttttctggcgagaaatccgtagcggaccgttggatcttaactcgtttaaatgaaacgatcgagaaagtgactgagttgtttgatcgttttgaattcggtgaagcaggtcgccagttatacaactttatttgggatgacttttgtgactggtatatcgaaatgagcaaagaaaccttatatggtgaaaatgaagcagctaaacaagtcaataagagcattttggttcatgtgttggatcaaatattacgcttgctgcacccaatcatgccgtttgtcacagaagaaatttggagtaaactgcctcatacaggcgattcgcttgtagtagctgcttatccagaagttcagccagagtggtcggatgagaaagcagcacaaggaatggaagtgttaaaagagttgattcgttctgtccgcaacattcgggcggaagtcaacacgccgctttctaagccaattacattgctgatccaaaccaacgatgttgagatcgagagcttcctgatcaccaacaaaaactatatcgaacgattctgcaatccagaagagctagtgatttccaatacactggaagcaccggaattggcgatgtcagctatcttatccggagcaacgatctatttgccattagccggcttgatcaatatcgaagaagaaatcagccgtttagaaaaagaattggcgaaattcaatcaagaggtcaaacgcgtgcaagggaaattagcaaacgaacgtttcgttgccaatgcccctgaagaagttgtggcgcaagagcgagcgaaagaagccgattatttggataaacaaaaagcagttcaagaacggatcgagcaattgcgtacgattcaataatctatttattgaatcgaggcagcaagctaatcatcgatattcctatggaacactagctgttgcaaattaccgatctaactatttactctctaactacccgatctctagctacccgatctatagaggaaagaattcctaaccgctatagatcgggtagttttcctatcgatttttgttgggaacgctctgagagaaagagcagtagaattaggaaaaaaagggaagatttgctaaaatgattttgaggtgaagaacatgacaagtgaagaagcaattgcatggatccacggaagaaagaccttcgggatgcgtccaggattgatgcgagtagaagcattgctacaacgattaggcaatccagaaaaaaatctgacattgatccatgttgccggaacgaacggcaagggttcgactgtcagctatttacgaagtcttctagaagaaagtgggctgcaagttggaacgttcacatcgccccatatcgagtctttcaatgaacggatcgagattgatgggcgttttataccagatgactcgctgattgaatgggtcgaaacacttcaaccactcgtcatgcaactggatcaggaagaagaattgaccggaatcacccaatttgagattttgactgcactggcattcggctactttgcccagcaacaagtcgatgtggctatcatagaagttggcttaggcggccgtttggatagtacaaatgtgatcacaccaatcttgacggccatcacgactattggaatggaccatatggatatgcttggtgacacgattgaggccattgctgcccataaagccgggatcatcaaacccaaggtgccactagtgactgggaagatccctgaaagtgcgctatccgtaatcgaccttgaagctgcagaatctgaggctcctgtatcccacttgggagaagactatcgagtcacgtatcatcgtccggatgaaatctggggagagtggttcgattttgagaatgaccgcggaaaaatcaaaggactgaaaacgccgatgattggtcgacaccaaccagaaaacgccggtgtcgctattcaattatattatttattctgtgagttaaaaaaactgccattttcggaaaaagtagtccgcaatggcttaaagaaagcttattggcccgcgcgaatggagaaaatcagcaatgaaccgctgatcattatagatggtgcgcataacacgcacgccatggaacgcttggttgagacagttagagaagaattcaccaactatcgcatccatatcttgttttcagcattggagacaaaaaatgtcgatgagatgctgcaacagctgttaacgatcccgaaagctgaaatctatttgaccacatttgattttccaaaagcgatccatttaagtgatgattaccagcaattgaatgaagcgcgcatctcgatcgtttcactatggcagtttggcttagcagaattattagaaaaaatgaccaatgaagacttgcttctgatcactggttcgctttattttgtatcagaagttcgggaacttttgttgggaatgggaggaagaaatggctgaattaaatggtgtgatttttgatatggacggactgatttttgatacggagcttctttactatcaggcaacacagatcgtggccgatcagatggagatcccctatacaaaagatgtctatctagcatacgttggtgtttcagatgaagaagtctgggcggcttatcatgaacgatatgatgctgccttcggtccagagactgttgatcgtttcatccaagccgcttttgatcaaactctgctgctctttgagcaaggtcaagcagcattaaaaccgggggtccatgacttgctgcgctatttggatgaaaaagggattccgcggatccttgcttctagcaaccaacgacgagtcatcgatacattgctggattccgcaggtctgacgcaagaatttccagaaatcgtttgtttcgatgatgttgtgcgggcgaaaccggatcctgaaattttcgaaaaagcccataatcgcttaggggttccgaaaaatcaattagtcattcttgaagattccgctaacggtattcatgctgcgcatgcagctggcattccggtgatcatggtacctgatctggttgctccgacgtcagtgatcgaagaaaaagtgctgcatatcttgccttcactggtagaagtgccggattattttgagcaggcctatacttggtagtgtcgcatcaaccatgaactcttttgcgtagttttattttagactaacgcaaaggagttttttttatgaaagacaatggaattcctcaaagttcctatcctcgagaacgactattgcattatggcgctgaagctttatccaatcaagaattgttagcgattcttttacgaacgggttctcatcctttcaatgtcatcgaactagctggtcagatcctcaacgagtttgaagacttgtatgagctaaagcacgtgacattggacgaactgcaggccattcgtggggtaggccagatcaaagcgatcgaactcaaagctaccgtagaacttggcgcccgcatccaacgagcagcacagccaaaatatggcagagttcattccagtgtggatattgccaatcagatgatggaggaattaaaagattaccagcaagaacatttgctgtgtctctacctaaataccaaaaatgagatcatccaaaaaaagacgttattcatcggcagtctcaatcagtcgattgctcatcctagagaaatttatcacggagcagttcgttgctgtgccgcccgagtgatctgcgtgcacaatcatcccagcggcagtccccaaccttcgcaggcggatattacctttaccaaacgattgatgaagtgtggggaattgatgggtatcgacttgctggaccacttgattatcggcaataattcatatatcagcttgcgagaagaaggactctgggaaggctgatcgtctaccttgcaaaaaaatagtagcaagtgtaaaatattagtgtaattttgtttgctgaatagatgttgaaacgcttgttacacctctatcggacacgagcaatgttacacataattaagtgcttatgcacgaggaggttttttataatggaacaaggtacagttaaatggttcaatgctgaaaaaggatttggcttcatttcacgtgaagacggtacagacgtatttgtacatttctcagcaatccaaggtgaaggcttcaagactttagaagaaggccaagcagtgacttttgatgttgaagaatcagatcgtggacctcaagcagtaaacgtaaacaaagcgtaagcttatttacaagactgcattcatgggattagtgaaggcacagtcaaaaaagaccatcattcagatggtctttttttttgctcgcgttctttgacaaaatcaatgaacgtgaggatttctttgattccttcttctgagattgattcatcgacatgggaactgatcaagtcactttctactttaggatagaggtgtctcttatcagatcggcctaagagatagtcggtcgacacaccaaatagatcggctaacacttgcagcatgctaaagtcgggctctctttttcctgattcataggcagtataagctggacgtgtgatcccgattttgtctgccacttcttgctgagttaacttcttttccagacgtaatttttttatgatttgcggaaacataatgacacctgcctctctcgtgatagtaacacaccgttacttagaaaaaaagagtcggttggtgtctatttgttactaaatgtcgttgacaagtgtcataaggaaacatataatgagtgtgtgtcgaaacgttacattccgaagaaggagggaactgtatgcgggagtggctcattaggcaacgtgaaaaaaatggactcactcaggatcaagtagctaaggaatccgaaattgagcgaacatattacaatatgattgaacgaggaaaacgccgaccaagtgtagaagtagcgaagcggatcggtaaagtgctccaatttgattggacgtatttttttagcatcgaaggtaacataacgacacaaaaagacaaacctagttaaatggaggaggggactcaagatgcctgtaaaaggtacagttgcaaaaatcggctatctgggtaaaaacaaaagaaatttccaggatctaaaaaaaggtttaaagaaacacaagtggctctacgtcatgctgatcattccagttatttttgtcgtgatctggaattattggccaatgtatggcgtgattatcgcattcaaagattattctcccgcatttgggatcttaggtagcccttgggtgggattgaagcactttgagcgtttttttgcttcctatttttttctcgagatcattgttaataccttgcgcttgagtctttacagtttgttggtcagtgtaccattaccgatcattttggcgttattattcaatgaattgaatcggaaatggttcaaatcaaccgctcagacgatttcatacatcccaaattttatttcggtggttgtcgtgatcgggatggttcaattctttttttcaagtcaagatggcatgattaatatgttgctgaatacatttgggtttccatcgatcgattttctcggaagtcctaaatggtttccgcatatctatgtgtggtcgggtgtctggcaaggtgtggggtggggaacgttgatttatacggcagcgatgtccgggatctctcccgatcaatatgaagccgcttacttggatggtgcctctcgcttgcaatgtattcgtcatatcacgattccttccatcatgccgaccatcgtgatctccacgatattggcgacaggaagcattttatccgtgggctttgagaagacttttctcttacagaacgctgcgaatctcgcttcctctgaggtgctttcgacatatacctataaaatggggatcataaatggggagtatagtttctctgctgcagtcggtctttttaataacgtgattaattttattgttttatttattgttaataaactagcacaaaagacaaatgaatcgagtctttggtaggaggaaaacgaatgaaagtatcagcaacgaaaggggataaactgtttaatactatcaatatcttactggtcagtctgattgccctgattatcttatatccgcttatctttgtggtcaatgcttccttcagtgatcccactaggatctatgaggtcccgttgcttttgtatccccgtggattaaatgttgaagggtacaaggaagtgctcaagagcagtgatatctggacgggttttcgcaacgcagtgatctacacgggtttagggacagtgatcaacttaatcgtcacgacgattgctgcctacccattgtctcgttccggcttacgaggcaagcgtttctttactttattttttacgattacgatgttttttagcggagggttgatccccacttatttagtcaatcagcagttagggatcgttaacacactttgggtcatgatcttgcctggagcgttgggtgtttataatatgattttgatgcgtacgtatttcagtcaaaatattcctaatgatttgattgaaagcgcttatatcgatggtgccaacgatttatggttattatggaaagtcgtcttgcctctggctaccccgatcatcgcagtgatggcaatgttctatggtgtcggtcgctggaatgcctactttgacgcgttgatttatttacaggatcgtgccaagtatcctctgcagattattctgcgagaaatactggttcagggacagtttggccaagatatgaaccaaatcattgccggtagtgcggaatccgaactgcttatgctgaaaatgaccctcaaatacagcgtagtgatcgtttcaagtctgcctgtgctcctattttatcctgtggtagccaaatactttgaaaaaggcatcctagtaggatccatcaagggatgaggaggtgtttcgatgctaaaagcgatcgctgcattttgtgaattagtgtacgatatgatgcttttgaatgtgtattggtggcgctacatgcttctgggcggtgtgctgtttagtctgataccggcaacgattactgtctacgattgcattcgaaaaaggattctgcagaaaaatgaagctcctctcaaagaaattttttcagatcaatatcggcacaacaaacaaaaaaatcgctggtttcatgttgcggctattgttctgactggttttgttattggggttcatcacacattagcgagtgattatcccaccagtttcttgtttgagtttacgatgcggacgaatctcctgattattttattgctggcgatcacatttttccctgtgcatgcttatttttcattagacaaagtccatcgttggttacagccgttactgtttgtgttcatttgtcccgttcagctattaataagtatgggacttcttggattggttagtcttctttattgttactatccatttttagggatctgtttagggatcggattgcctgcttatgggataggtttcttgtttttcaataaatttaacaaaatgaaaggagtctatttttgatgtcgcccgttgttcgattgtataaaaaggagagaactgtatgaaaaaaggagtgctattgtttttgttgtccttcgtctggctgttgtcggcttgccaatctagtccaagtgaaaaagtagcagatgacgtaaagtcgattcatttaatgaggaatgattttacagacgtgaggccgaaaagcgaagacctgtggatgtggcaagagtacgagaagaagtctggagtcaaagtacagtgggaagaagtaaaagagtttggggaaaagaagaatttgattctatcaggaaagctgcctgatgccttttatcagaccggctggagcaatgatgagatcgtgaaatacggacagcaaggattgttcattccattagaagatctgattgccgaacatgcaccgaatctgcaaaaaatcttagatgaaaatccgattgtcaaaaagacgttaacagcaccggatggtcatatgtactcgctgccgtatatgtctttggatccaatgagcggcgggcgaacggttcgactgtatatcaatcaaaattggctggatgaattgtccttggatgtccctcgtacaacagatgaactgaaagaggttctagctgcttttgtagcgagcggggaaggacgagaagggtattatatgccaagtggctggttagccggcggactggaaaaggtcttgatggcttcctatggattggggacaggcggcagacaggcgatggggaatatgctgtttgtggatgaagcggggcaattacagttgaccatcaaccatgaacggatgcgggaagtctggatgtacctaagagagttgtatgcagaaggattagttgcaaaacaatcctttgccggcgtggatgatgacaaatggcgagcggatgctgcccaagacaaagttggtctcttccagtgggtcgatcctgatttcattggcccatttggaccagaaacgtatacgccgatcaatgtcattgaaggaccttatggcgacaagacactttatacggaaccgcctgtttctggtacttcagcatttatcattacgaaggatgcagcagatccaggattacttcttgagtgggtggattacttctatagtcctgaagggcagatttttgcttatttaggagaagaaggagtgacctatgaagttgacgaagatgggcacatggtctatattgacgaaatcttaaactatcaaaacgggccgcaactcggtgctttccagtgggtcgataatgtgtatggaggctatttcccttatgcggaattggatcaagaaatcagagatcgagcgtttggcaaagaaccggctgtctatgatgatgtcaaagaagaatatatgccggaatacatgctgccgacatttatggcaaccgaagcagaagcagcagaattgtcaacgatcgttacagatatctcaacccatgtggaacaatcgcgggtaaagttcattacaggtgaatggaattttgaaaaggattggaccaactatgtgcagcaattggatcgtatcggtgctcaacgcttattggagatccgtcggcaacaatttgaacgctttaatcaagactaacttaagggcgaataagcagtaggaaaaccaagtgaatgccaaaggagcagaacaaaatggattattttatgcaagaagcaaaaatcaagcaccgcattcaagaaatcgaggcattgaggtatcgaaacaagcgtcagatccagcaatggtttgtcacagaggatcagacaaagtgtcagaaatatccgccactcttttcgactgaacaagtcatgcacataggggaaacgtggcaaggaagggatcgctatttatggcttcaagcgaaagtcaccattcccccgaagatgaatatattgttttttgattttggaaaaactggtggcggcaataactctggttttgaatcacttttatttattgatggtgtccctgttcagggaatcgacgccaaccacaaagaatttctattagaacctgcaaatttaggaaaagaagtgatcgttgcgctgaagctatggtctggactagaaggcggtggcgaagaacggcagctgacccatgaactgaaagctgcatttatcggttatttggatgaagaagccaacaattatttttatctttctaaaatgattttagaaacgatccagcaattagcagaggatcatgaccggaaggttcggctgctcaagatgttgaatggttcgtttcaacggatcgattggcgagaaaaaggatcaccgcagttttatgatagtttgcgggaagcacatctttttctaaaagaggcgctgcaagcacttcccaaaagtgacttggttcaagtcacagcgattggacacacccacattgatcttgcgtggctttggcagttgaagcacacgcgtgaaaaggcggcccgcagcttttctacagtcttgaaattgatgaaagaatacccagaatatgtgttccttcaaacccagccgcaaatttaccaatatatcaaagaggactatcctgaattgtatgtgcaaatcaaacaacgaatcgcagaaggccgctgggaagttgatggcgccatgtgggtcgaagcagattgtaatctgcctagtggcgaatcccttattcgccagattctctacggaaaaaagtttattcgcgaggaattcgggcgggaaagcacctatctctggctgccggatgtttttgggtattcatgggcgttgccgcagattctgaaaaaaagtggaatcaatacctttatgacgacgaaaataagttggaatcaatacaatcgcatgccaaacgacacctttctatggaaggggatcgatggctctgaaattttgacgcatttcatcacgacacccgttccaggtggtggcagctggacagaaaaatccaattggttttacacgtataatgggttgctgaccccggagacggttttaggagtatatcgcagctatcaaaataaagcattgaatcaacatctattgatttcctatggacatggagatggcggcggtggtgtcacccgagaaatgttggaaaaccgcagaaagatggctgaaattccgggattaccgatgcttaaaacgggtcgggctgctgacttttttgaagagttacatgaaactgtcgaccaaaattcgaacgatctaccaatctgggatggggaactgtatttggagtaccatcgcggtacctatacttcgcaggcctttatcaagaaaatgaatcgctggtttgaaatacgcttgcgggaacttgaatgtttgtacagtcttcagtctatgacagcaggaacggcttatcctgctgcagtattcgaaaagctttggaaaagcgtcttgaagaatcaatttcatgacattatcccgggctcttccatcaaagaagtctatcaagattatcggaacgaagcacttgcttgtcaaaagcagcttcatgctctgacaactgctcttgagacagaagaacaacaattacgtatcatcaatacagccgcttggcagcgaacaagcatcattgcagtagcaccgggcacggtacctgaacagcagcaagttttcttcgacggttcctgttacgctctggtacatttgccagcattccaagcgagtcttttgccggattgtatctgtgcgttgccattggaagcagtgtccgttagtgaaaaagaccgactcgagactccgttttatcaagtccgatggaatgaggcggggcatttgacccagatctatgacaaaaccgcacaacgagaagtgcttgctgggacagggaatgtctttcaattatttgaagacaaaccattgaatttcgatgcgtgggatatcgatcttttttatcaagaaaaaggcacggagctaagcagtgcaggcattcaagtcatcgcgaacaatcctttgtttactgtcttagaacagcaagtcacttttgggcagtcaactattttacaaaaaatctatttctatgctcatacgaagcgaattgattttgttaccacggtggattggcaagaacgccagcaattgttgaaagtgaaatttgatgtcaatattcgcgcgacagaagctatttttgatattcagcatgggaatgtgaagcgtccaactcactggaacacgagctgggatatcgccaaatttgagacagtaggtcatcagtgggcggatgttgcacaaatggattacggggtggcccttttgaacgactgcaaatacggctacgatatcaaaggcaatcagctgcgattatctttattaaaaggagcaacatacccggatcctcaggcagatcttggttcccacacgcttacctacagcctatttccgcatcaaggagattttgcaactggtcaggtgatggaagaagcttgggagatcaatgcaccattgagtcaacttcaaacagagatggcaagtattcctcttgaaatcgaggctgatgaaagtttgataatcgacgcattgaagttagcggaagatcaaagcgggtggattttgcgttgctatgaccatttagggagcgatcgcgacgtcaccattcactgtcatggaactggcaaaattcgctggcaagagacgaacatgatggaagaagctagcgaagagttaaaagcggagccgatcgcattttcattgcatccatatgaagttaaaaccattaaactggtgcttagcgaaaagtagatagttctcctgaagagatgtatcggtgagatcacttcttagatcgtttttaagacagtttttaatatagcctccaatatagctaagtttccaaagtagttttaaatagctgtggcaagagacagtaccgataatcctgcgtctaatttcgaaagaagagagtcttaaacctaaggaagtcagtaggatgaaaaataaaaaactcgaccacttccattgagggtttggtcgagtttttttgttagtggtcgtcaggtgtcatgatcatcgaaagaatcattgggtgacgttctgttttttcaaataagaagggttgcaaagcagctgacatggcttctcgcattttatgttcgctaggatctggctggttcaagacttctctgagggcacggaacaggatctgttgtgcttcattgatcatctcgccagattcccgcatatagacgaatccgcgggaaagaatgtctggtcctgctaagacttcttttttcgtcaagtcgacggtggctacggctagcactaagccttcttctgataagatacgacggtctcgtaagacaacgttaccgatgtcgccaattccactaccatcaacatagacatcacccgcattgaaatgacctgctcgacgagcagaatctgcagttaacgccagcatatcaccgttttccataataaaacagttctcttttggaacgccgacatcttgtgccagttgggtatggatattcaacattctgaactctccatggaccggcataaagaacttaggcttcatcaaacgaagcatcaatttttgttcttcttgaccaccatgtcccgaggtatggatattattcaatttcccgtggatcacatgtgcacctgcttctaacagcaagttgatcaagtggttgacactagtcgtatttccagggatcggtgaactagagaaaatgaccgtatcgtctggatggatctgaatttgtcgatgagtaccattggcgatccgactaagggctgccattggttccccttgagagccagtacataggatcatggtttcattagctggtaagcgattgatctcatgagattcgacaaatgtaccgtcagggactttgatataacctaagcgctgcccattaacgatcgcattttccatacttcgaccgaagacagcgatcttacgacctgtggcaaccgcagcatctgctgcttgttgcaaacggaaaatattggaagcgaagctggcaaagatgatccggccttcgattttttcgaaaatcttgcggatcgaactaccaatcgttttttctgacttggtaaaggtcggaatctcagcattggtactgtcagaaaggaggcatagcacaccttcttctccgattctggccattttgtgtaggtttgctggttcgcccacgggtgtgaaatcgaacttaaagtcaccagttgctacgatatttcccgaaggtgttttcaccacaacgcctagcgcatcaggaatactgtgggtcgttcggaaaaagctgaccgatgttttgcggaagcgaatcacggtatcttcattgatctcatgtaatgtagcatctcgcagtaacccgtgttcatccaacttgttggtaatcaaagccaatgctaatggaccagcatagattgggatatttgcttcacgcagaaggtaaggaataccaccaatatgatcttcatgaccatgagtgatgactaaccctttgactttcgtgatgttttggacaatgtagctataatcggaaatcacatagtcgattccaagtagttcatcttccgggaatttgatcccggcatcaatcaagatgatctcgtcttggaattgaaccccataacagttttttccgatctcgcctagtccgccgacgccgaatacgccagtttcattattttttagagaaactttcattattaaaactccgctaatttgaaatcagcgttctctttttcatacgcaagatgtttttcatcaagttcttgaataaactcgatgttatatggggtgttttgttcgactgtacggcgtgcagcaaccgcgctttctgcgtcaatgtacagggaatgggtttgttctctttttgggttgcggtcttttgtttcttgatagtaaactttgtaaatcatacaaattctcctttatctgctaatgcagtagtttatcgttttgttcgattcggtgcatcacaaaatcaaggccctagataagtgacctgaaaagtgggggtcgtcagtggaccgctacatgctttttccagacaatcgttgtgagaaaaaagagaaagcctcgtctttgctttccaaatgttgtcataaaaaattcaccgttttttgtaaatcgttccattacaagtagtattagtttatcatagaaaagtaaataagtatagaaactagttggtttgaaagggcttcccttggtcatccttaaaaaaatactttaaaatatctcctttttttcttcgggaagtgggttacttgaaattgggactatgatatagtaaaaataatgtgtaaaaaaaggaggggcttttttgaaattaatgtggcattacacaatgcgcaataaaaaactgttggtttttaatttcatctgtgtgtttggatttattttgattgaactaggattacccacattgctggctcgaatgatcgatgtcggtattcgaaatggtgaccgagagtatatctggaagatgggaatggcaatgattgctattactttgacagggatcgcaatgaatattatgttagggtactttacctcaagaatcacaacgaatatcgtagcagatgttcgagatgatctttttgaaaaggtgcaaggttattcacatacggaatatgaaaaaatcggtgtttcatccttgattactcgggtgaccaatgatgcatatcaaatcatgttgttcttgcagaatattctgcggattggattgatgacgccgatgatgtttgcggtcagtttgtatatggtcatgcggacaagtacaaaattagggatgtatgtgttaggggcactgccgatcttgttgattgctgtgatagccatcgcaaagatttccgagccgttgtctaacaagcagcaagccaatttggataagatcaatggtattttgcgggaaaacttgtctggtttacgggtcatccgtgcgttcgtaaatgagaaatttgaagagaaacgctttagcaaagtcaatcaagcgtatgcatccagctctcgcagcttgttccgtttgatggcgacagcacagccgggctttttcttcttattcaatatcgtgatggtactgatcatttggtcaggaagtattcaaatcgaaaatgggcaactgcaagtcggtgacttgattgcttttatcgaatacatcttccatgctctattctcattcatgttgtttgcgactatctttacgatgtatccacgtgcagcggtctcagcccgacggattcaggaggcattggatatgacttcagaaatcgtggaagccgaacagccagtgacagaaggcaagaccaaaggatatgtggaatttaagaatgtgacatttgcctatccgggacatgctgagagtcctgtgatccgcaatgttagttttactgcttctcctggtgaaacagttgctttcatcggcagtactggaagcgggaaatcaacattgatccaattgatccctcgtttttatgatgtcacaaaaggacaggttttgattgatgggatcgatgttcgcgagtacagcttgtccgctttgagaaataagatcggatttattccccaaaaagcgttgctgttcactggaacgatcgcagaaaatctgcgctatgggaaagaagatgcgacacaagcggacttagaacgtgcggttgagatcgcacaagcagctgattttattgctaaaacaccggatggctttgatgcacgtctagcagaaggaggcacgaacttttctggtggtcagaaacaacggctggcgatcgctcgtgcggtgatccgtcgtcccgagatctatatttttgatgatagtttttctgcactggattatcaaaccgatgccaaattacgggcgcgtttgaaaaaagaaacgaccgaatcaactattttgatcgtggcgcaacgtgtggggacgatcatgcacgcggataaaatcattgtgttgaatgaaggcgatgtagttggtatcggcacccacaaagaactgttggaaaactgctcggtttattacgacattgcagcatcacaattatcagaggaggagttggcacaatgaaagcattctcttctttaaaacgtttagggcgctacatcaaaccctacaaagtctcctttattttagtcttactttttactgtcgctacagttggctttaacgcggcattgccgtatgtgtccggattgcctacaacagagatcagtcggaatattgcagcgggagagccgctgaattttgattacatcatcgtttgtttgatctggatcaccgttgtcggtgtagggtattgtttctcacaattaatgtcagggcttttgatcacaaatgtcgttcaatctgcgatgcgtgatttacgtcaagacattgaagaaaagatcaaccgcttgcctgtttcatattttgacaaaaatcagcaaggaaatatcttgtcacgggtaacgaacgatgtggatgcagtcagtggtgcgatgcagcaagccttgatcgggatcgtcaatgcctttctaggaatcatcatggcggtagcgatgatgttttatatcaattcgtttatggcgttgatcgcattgatcatgattccaacgtcattgatcatttcaagaacgatcgtcaagaaatcgcaaaaagacttccaaggcatgcaaaatgcattaggagacttgaacggttatgttcaggaaaatatgactggtttcagtgtattgaaagtctatggacgagaaaaacaaacacttgacggctttaaaaaagtcaatcaccaactgcgctattacggcttccgttcggccttcgtctcgggattgatgatgccgttagttcaaatgactgcctactttacgtatattgctatggcagttatgggaagtttctatgtaattggcggtgtgatcgtggtagggcaactgcaagcctttatccaatacatttggcaagtgagtcagccaatggggaatattacccagctttcctctgtcttacaaagtgcttcggcagctgcaaaacgggtttttgagattttggatgaaccggaagaaccagtcaaccaaacagatattccattgccagcggaatttcatggggatgttcaatttgaacatgtcggttttgcctatgatccgaagaaaccgctgatcaaagatttgaactttgaagtgaaagctggtcagacggtagcgatcgtcggaccaactggagccggaaagaccacattgatcaatttgttgatgcgtttctacgatgtcaacgaaggggcgatcaagattgatggtattgatacgaagaaaatggcccgcagcgatgtccgttcgttattcggcatggttctgcaagatgcttggttgtatgaaggaacgatcggagacaatattcgttttggtaagttagatgcgaccgattatgaagtggtcgatgcagctaaaacagccaatgtggatcatttcatccggacgatgccggacggttatgagatgtttatcaattccgaaggggataatatctcgcttggtcaaaaacaactcttgacgattgctcgagcagtcatttctaatccgaaaatcttgatcttagatgaagcaacaagctctgtggacacacggctcgaagcgttgatccaaaaagcgatggacaaagtgatggaaggacgaaccagtttcgtcattgctcaccggttgtctacgattcgggaagccgatttgatcttagtcatggatcaaggagcaatcatagaaaaaggcaatcatgaaacactactggcagctgggggattttacagtcagctttatcagagtcagttttcagaagaagcagaataggtcaaaagagtgtggtgtcagccgcactcttttttttgtatgaagtgtgaagatatccgcatatagtcgctgttctcttacggactgattcgtggttttcatagttattcatggtatcatgggtacaggaatagagtagtatagtagtaaagtatagtagtaaagtgtagtagtaaagtgtagtggagaaagaaaaatcctaaaggagtttaacaatggatcggaaaaaagagacaaatagccaaaaacgaaatcaactaaacgcagaaactgctagtacgcaaaactttatcgcgccaaatgcgactgtcgtcggagatgtcaccatcggcagtgaggcgactgtctggttccaagcagttttgcggggagatgcaaattatattcgagtaggtgagcggaccaatattcaagatgggacgatcattcatgtggatcatgatgcacccacgatcattgcagaagatgtgactgtcggtcatcagtgcatgcttcatggctgtaagattgaaaaaggggccttaatcggcatgagttccattgttttgaaccatgcagttatcggtgaaaacagtttgattggtgccggttctttagttactcaaggaacgatcattccgcccaatgtgctggcttttggacgtcctgctaaagtgattcgtccgttgacagaggaagaaattgccaaaaacaaagccaatatcgcccattatgtttccttgggaaaagactacttgcaagggaaatatgtttattaatggcaagcgaagtcaatcggatctcgtttaatgacgcaaaaaaaccagcgtgcttcagcacagctggttttttgatggatgaattattttaagctgtttgattccatgatctcgtcgatcaagccgtaatcttttgcttcttgagcagtcatgaagttatcacggtctgtgtctttttcgatgacttcgattggttgacctgttcgctcagacaagattttgtttaggcgttcgcgagtttgcaaaatgtgacgagctgcgatttcgatctctgttgcttgtccttgtgcgccacctaatggttggtggatcatgatctcagcatttggcaaagcaaagcgtttgcctttttcaccagctgtcaataagaatgaacccattgaggcagccatccccataacgatcgtttgcacgtctgctttgatgaagttcatggtatcaaagattgctagtccggctgtgacgcttccgcctggtgagttgatgtacaagtagatatctttttcagaatcttgtgcatccaagaataaaagttgggcgatgatcgaattggctaaatcatctgttacttgaccacttaacataatgatgcggtcttttaatagacgagaatagatatcataggctctttcgccacgagatgattgttcaatgactgtaggaattaaattcattttttagtcctcctaaaaatcgatatagatatagtttagcacaaagtttttgcaatatctaaaagtaagtatacccattaggtcaataaaggtcaaataaaaagttcgttatcttttttgcctctcttttaaattatgatacaataaaaagaaagtaagcatgaaagggtcagaagaaaatggcagtagcgattgcaggttttatcggcgtattagtaggcgccttattagtaacgatcatcttcaatctcagaattcgttacgatgaacaaaaagaaaaacggcgacggctgttggagcataaagtcaaagaaatcgagacacttctccaattgaacaggaaaatcagcgaaattttacaaaaacgggtgatcctgatggacgaatatgtcagtttcgatgctttcgatgactgttatataacgatcgatgattttgcttatttacagtcttttgccgcacagaataacttttatttgccgaattattttttagaagaatttttcaagaaaatcggtacccgcagagtgatcctttcaccagaagaaacggtgaagatcggcggttatacgtataaaggcggtcgtgtcatcatggagaatttcttggatacactgactgaaatggtcaatgagcgcaaaacgcaaatgaaaaatttgaccaatgaaccattaacttatttttctaaaccattatagtcgagtcaatcgagaatggggctataacattgagtctgtgacagaagttgcaacgagatgatccgaaggacgtgaacggaattgcgctctccatcgtgtatttgatgaagacctgctgcagagtaggagcaatttcatgattgttgggaggatcattttgtggaaaaacttctgtcatagcctctttttttgtcgattctctgatatatacaaatcctagcgatgcctttagaaaatgaggatggcacaaggagtaggagtttggttctatggggttccgtggtaaaatagaaaaagattggagtgaaacaaatggtacaaatcgttgcccatcgtggcagtagtggagaccgtccagagaacacgttaccagcctttgcagaagcagttcgggtcaaagccgatatcattgaactagatgttcatctatcaaaggatggtcacctgatcgtaatgcatgatgaaacagtcgatcgcactacgaacggcaaaggccgaatttgtgataaaacgctgacagaactaaaagaattgaataccggcagctggttctcagaagattatgccgccacaaaagtgccgacgttgaaggaagtcctcgatcttttagcagcaaagaattatcgtggtattttaacgattgaattgaaaacagaccattacgagtatcaagggatcgaaaagaaagtatctgaattgttagccagtcaaagctggccctttactcattggtattgttcattcaatgttgacacattggatcgattgtatgcgattgaaccgcaagcaacctttgactttattatgggaaaatcggaggcgaaacctccgttagcattgtcgcgcccttacattgaagggattcatcctgcctatgagtgggtcaagaaacatgaggaacagatcgcggattatccgattgccattcgtccttggacagtcgatacagaagcagaaattcgtcactgtcttgcagtaggggtcacgggaattattaccaattttcctgagcgagtccgggaagtccaaaggaaggttcaggaggaagctcattgatggaaaaagtgattgtggtagtcggaccgactgcggttggaaaaacggccttaagcatcgaactggcgaaaaagtatcagggagaagtgatcagcggcgactccatgcagatctatcgtggcttagatattgggacagccaaggtaacagctgcagaaatgcaaggaatccctcatcatctgatcgatattcgcgacagccatgaatcctattctgtggcagaatttcaaaaagaagcccgtgagttgatcacggccacccatcaacgaggtcatctgcctatcgtagcagggggaaccggattgtacatccaggctttactctatgactatcaattaggagccgctgaggaaagtgatccttccgttcggcagcgctaccagcaagaagcagcaagaattggcaaagaagcgctatggcaaaagttgcaggtattagatcctttagccgcagcaaagatccattacaacaatgaacgtaaagtgatccgcgcgttggaagtcttggaaacaacgggaataagcattgcagccccgactactgcaccggaagcggtatacgattattttatgattgggctttccacagaccgacagttgttgtatcagcgtattgatcagcgagtcgatcaaatggtggaagcaggtttggttgcggaagcacaacaggtgctgatccatcctgagacccaagcagcaaaaggaatcgggtacaaagaatttgccccttattttgccggtacatgttcattagaagaaacggtcgcacaaatcaaacaacagtctcgcaggtacgccaaacggcaactgacttggttcaagaatcgtctcgctcctagatgggtcgatcttgtccagcatcctgaggacgtatcttcgatcgaaaaagcgatcgaccaatggttggaggagaaggaatgacacaagaacgcgtaatccttgttggcgtagaaacagaacgaaattattcgacctttgcgtcctcaatgaatgaattgaaaagtttgaccaaaacagcaaacggagaggtgattttttcactgatccaaaaacggccgcaagttgatcggcaaacagtgatcggaaaaggaaaattggcggaactgcaacagttagtggatgcccatgaagctgatttggtgattttcaatcatgaattgacaccccgacaaagccagttgattggtgaagaattaggggcgccagttattgatcgtgtccaattgattttagatatctttgctatgcgcgctcgttcaaaagaaggaaaactgcaagtagagctggcacaattagattatttgctgcctcgattgatcggacaagggaaaaatatgtcccgtctggggggcggtattggaacgagaggaccaggagaaaccaaactggagacggatcgacgccatatccgtaatcggatcacgatcattaaacgagagttgaaggaagtcgctgctcatcgtgatcgtacccgtcagaaacgccgcgacagtcaagtctttcagatcggtttgatcgggtataccaatgctgggaaatcaacgattttgaatttattgactagtgcggatacctatgagcaagaccaactgtttgcgacgttagatcctttgacaaagcgttggcggttgccggaaggattggaagtgaccgttaccgatactgtcggctttattcaagaactgccgacacaattgatcgatgcctttcattctacattagaagagagtcaaaatatggatctgctgctgcatgtggttgatgctggttctcatgatcggcaacagcaagaaaaaacagttttagcattgatggaagaactatcattgacgcaagtcccagttctgacgatctataataaagctgatcgcattgatccagaacaatttgtgccgacgctgttccccaatgttttgatttctgccaagagcagtaaagggaaagaacaactgatccaagcaattaaaatggaactcatgcaaatcatgcagccttatcaaaccgttttagctgccaatgaaggcaagcgattgagccgtttgaagcgggaaacactcttgcttaccaatgactttgacgaggaagatcaaacctatcacctaaaaggttttgcattgccaggttctgccgggatctatccaacaattgaagagtaacgctcaggaaatgaagtggtcgagctgtgtgtagggaattctaatacctgcacgcagttttttttcagtgattaccactggaaatttttttcattcgaccagtaaaaggatggttttctagtgattgttctgccaaacagaaaaaaataaatgtctatgtcactttttcttacatgaagggttgacagtggaaaaaacaattggtatagtttcaattaagttatgcaggatcatctaaatgagggaggcgccacgttatgcgggaaaaagagttgcggcgttcgatgtctgtctttccgattggaacagtgatgaaactaacggatctgacggctcgtcaaattcgttactatgaagaacaagaactgatccatccagaacgcagtgatggtaatcgacgcatgtattcattaaatgatatcgatacgctattagaaatcaaagactatctgtcagatggtttgaatatggctgggatcaaacgtgtgtacgagatgaaaattgccaaagaacaagaagcaaagaacaaaccgccactgactgacgaagatgttcgtcgaatcttttatgacgaactcctagcgcaaggtggtctgaatcaacaacagccattccaacaaaaaggtccgctaatgtagatcaatgttgtggcacgaaagaataaaggtcaaaggaagggatattatgccgaaaattgaaagaacagccgaagatatcaaacaaatcgttaaagacgagaatgtacgtttcttgcgcttgatgtttactgacatcttgggaacgatcaaaaatgtagaagtaccagttagccaattggaaaaagtacttgagaacaaaatgatgttcgatggctcctccattgaaggattcgtacggattgaagaaagtgatatgtacctttacccagatttatctacttggatgattttcccatgggaaagtgagcatggcaaagtcgctcgtttgatttgtgatatctacaaccctgatggcacgccatttgctggcgatcctcgcggcaatttaaaacgggcactatcagatatggaatctctaggttttacttctttcaatcttgggcctgaaccggaatttttccttttcaaattagatgaagatggcgaaatcacaacagacctaaatgacaaaggcggctattttgattttgcaccgactgacttaggtgagaactgccgccgcgatatcgtattagaattagaaagccttggttttgaagtagaagcctcccaccacgaagtagcaccaggccagcacgaaatcgactttaaatatgccgatgcggtagaagcgtgcgataacatccaaactttcaaattagttgtcaaaacgattgcccgcaaacacggtttgcatgcgacatttatgccaaaaccattatatggcatcaatgggtcaggtatgcactgcaatatgtccttgttcaatggaaaagaaaatgtcttctttgatgaagaaggaccaatgcagttgagccaaacggcgtatcatttcctagccggtttgattgaacatgcccgtgcttatacagcagtctgcaacccaacagtcaattcttacaaacgtctggtcccaggttacgaagcaccggtttatgttgcttggtcaggacgcaaccgttcaccactgattcgtgttcctgaatctcgcggcttgtccacccggttagaattgcgctccgttgatccatccgctaatccgtatttggcaatggctgtcttgctgcaagccggtttagatggtatccgtcgtgagttgacaccgccgcctgcagtggaccgcaacatttatgtgatgaatgaagaagaacgtgcagaagcacaaatcgaagacctgccatcaacgatccacaatgcgatcaaagaattgcgtaaagatgacgtgatgatcgatgcattgggcaaacacatttttgcgaactttgtggaagccaaacgtttggaatgggccgcttttcgtcaaacagtttctgagtgggaacgcgagcagtaccttgaattgtactaatcaattactagtcgttcgatctgcagaggcaacaaacgaataagtcattggaagatggtccttagaatctattgaagcgtctgtgacaaccgatacaaaaaaagaaaccgctagagaaaaccaatctagcggttttgttctgtaatctattcaaagtagaagacaggaatcgaacctgcaccttgttttcgcaaaaatgataagaaaacgatttctgatcatttgtaacaaaacaagtaaagcaccgagcttcctctacaagaatcattatgacaagcagacccaaagaatccattaagaaagtaagaaagaagtttagcgatttgtgaatgttcatcgaaatcagcgatttttcgatgtatccgcatccagaaaggattcgagaaaagtttgcttgacttttgctaggcaagattgtatcattctgtttgggcactcttgaaaaagagtcagaaagtgatttagaattttcgctccctattcatttatggatagggagcttttcttattttctaagtacttttcctgcaaaatagtttaaaaggagtttttcagtttatgacaaaatatatttttgtaaccggcggtgtggtttcttcgatcggtaaaggtattgtggcagcatcactaggacgcttattgaagaatcgtggcttaaaagtaacgatccaaaagtttgatccttacatcaatgttgatccaggaacgatgagcccataccaacatggtgaggtattcgtgaccgatgatggtgcagaaacagatttggacttaggccattatgaacgtttcatcgacatcaacttgaacaaatactcaaatgtaacgactggaaaaatctattcagaagttttgcgcaaagaacgtaaaggggaatacttaggagcaactgtccaagtaattccgcacatcaccaatgaaatcaaagaaaaaatcatgcgggcagcaaaaatgaccgattcagatgtcatcatcactgaagtcggcggaaccgttggcgacatcgagtcgttgccgtttctagaagcgttgcgccaaatgaaagctgacgttggttcggacaatgtgatgtacattcatacaacgttgattccttacttaaaggcagcgggtgaaatgaaaaccaaaccaacgcaacacagtgtaaaagagttgcgaggattgggtatccaaccaaatatcctagtggttcggactgaacaacctgtgtcccaatcaacaaaaaacaaattggcccaattttgtgatgttgcacctgaagcggttatcgaatcccgagatgtagaaacactctattcgatcccattggctttacaagcacaaggaatggatcaaatcgtttgtgatcacttgaaattgaatgcgccagtagctgatatgacagaatggcaagcattagaggaaaaagtattgaacttgaaaaagaaagtccgcattgcattggtagggaaatatgtggaattgccagatgcgtatctgtctgttgttgaagcattgaaacattctggttttgcttatgatgccgacattacgatcgattggatcaaagcccatgaattaacgaaagacaatgttgccgaatacttacaggatgcagacggtatcttagttcccggcggttttggcgatcgtggaatcgaaggcaagatcgaagcgattcggtatgctcgtgaaaatgatgtcccattcctagggatttgtctgggaatgcaaatggcctgcgtggaatttgcccgcaatgtcgttgggttagaaaatgcgaattcggcagaaactgatcccgatacagcaaacaacatcattgatttgatggcagatcaagaaaatattgaaaacttaggcggtacgctacgtttaggcttgtatccatgtaaagtcaaaaaaggaacgaaaacagctgcagcctatgaaggagaagaagtcgtacaagaacgtcatcgtcaccgttatgaattcaataataaataccgcgaaatctttgaagcagaaggtatggtcttctcaggtgtctcaccagacaatcgcttagttgaaatcgttgagattccagaaaataaattctttgtgggttgccaattccatcccgaattgatttcacgaccaacacgtccacaacgattgatcaaagcatttgttggtgcatcattagacaatcgtgggtaacacatatagtaccagattaaaaaccagctgttgagctggtttcaggttgtaggcaatgtcccggaaaagggaggcctacagcctttttttaagcataagagtacgctctaaataaatgtgggggaaatatagtcaggatcactcgacccatttataaaggaacgttctcataaaacacccttcaaaagttagttttttgggttaacttttgaagggtgtttccgttctagccagtgctagtgctttttttagtagcatccgaagtgatacgccttttcagctactcctaactattaaagataaaacttcttgtagaaattgaccctaataaaagggaccatatacctatggaggttgactacaatagactctaaactaattaatgagggagagaaagatggaaaaaataagcttattgttgatcagggctctttcagagcaagacgggtttatgacaaccaaagagatcgctgcaaaagtaggtgtcagtacgaaaacagttcgtagatatgtggagaaaatcaatcaaagccaatcgctttatggctgtgtgattcaagggaagaaaggaagtggcttgtttttacaaataatcaatcatgaattatttcaacgtagcttagaaaacacacctcaagaagattttgtgacacaaatcattgagtacttcgtccaagaagacgaatacatcaagtcagaattattatgtgaacgcttatttatctcacaaagcaagttatctcaagaactcaaaaaactgcgacggattttaagccattataatttatccatccaaacaaagccttactacggcatgaagctttgcggcagtgaattcgacttacgtcgctttatggcaagcaattatctgcaaaagacacaccttaaacaactgcatcaattaccttctagtgaagggacgccatcgcagttgcatcgacagattcaagcaatcattttagctgagttttctcaaaaagcctatccgatttcagaagctatagtgacgaacttagtcaatcacctagcaatcgctgtaatgcgaatgcaaagcggccgctacttggatcgcaatctgcctattggaggaagaaccaatgctgaacaatcattattaggcaagcgaatcgtcaagcggatcgaagaagaatgcggtgttctttttacagaatgtgagcgaaattatgtgcttcgtcagatcgtggggaaacgggtcattcccaaaaatgaaaaaaacgttgtctcagaggaagtttcggacttagtgaggcaagttctaaaaaaaatcaaaaaccgaagacaaattgacttcagtcaagatttggacttacagacgatgctgatgcttcactttgttcctttgattgatcgaatcgaattaggaattgagctgaaaaacccgctgttagatgacgtaaaagtccattgcaatgtaggatacgacttagctattattgctggtcaagtaatcgttgcgcatttcaataagcgtatcagcgatcatgaacttagctatttagccatgcactttgatgtcgccctgaataagaagagttcacaaacgcagcgtaagtatattttagttgtaaacgatctggggagagcagccaatgcatttttaaaagaaaagtttgaattctatttccgaaattacattaaagaagtaacggtttgtaatcaatatgaatttgctcagttcctaaaagaacaagactttgattttatcttttcatcaatcgatctaccttatgaaggaaccattcctgtaatgagttttgactattttatgcggcctgaaatgatcaaaaaaatagctgatgcactgtcgactgtttttaccgttgaaaaacttttgaccttctttaaggaaccgctgtttatttgtgaccaagactttgaaacaaaagaagaagtgctgcattttttatgtcattgcattaacgaacaatatcagatgccaaataattttgaagctttggtatttgaacgagaagctttttttggaaccgatttcttgccgatggttgcttttccacaccccaatgtattgattggatcggaaacagtgattgctgttgcccatttgaagaaaccaatattttggtataaacaatcggttcgtttggtcttcttactagtcattgctgagcaagaccatttaaaggctaagtcgctaaacgatcatttgatcaaaatatgtacatcatctgagaaagtgaacgaactgattgcgacgaatgacttcatcacatttatccatcacttaaaggagtagattatgacagacaaaaaaatcaaactatcaggagcatacaattttcgcgattttggcggctaccgtaacaaagaaggaaagcgtctcatacgtgggcgactctatcgttctgatgaattaagcaagattacagctgcagatcaagaaaagttagtacaacttggaatcagtaagatcattgattatcgaaataaaaaggaaagactgaataatgaagatcggccgatcggtaatgcagagattctttatttgacacccattgcggatattgctgccctagcttcttctgaacatgatgaagaaagtgcactttctccccaaaaaatgacggcggctctggcaaaagaattaatgatccgtcagaatgaagaatttgttgaaaataaacagtgtcaagacgtttatagagaagtcttagaaattcacttagctgaagagggggcaatcgtccaacattgccgtggagggaaagatcgcactggttatggcgtcgctctcattcaattactacttggcgtcagtgaagcagatgtgttgcatgactatctcttaaccaatgtatacaaaaaagaaaaaaatgagaaaagcctgcagctgttgcttcaagagaccgataatcccgattttgttcaggcgatgcgctattttaaagaagctgatcgtcattttttgcagaatgcattggcgcgaatcggagcttatggtggagttgagggctatgtggtcaacaaacttggtttttcccaacaaaaaatccgcttgttaagagaaaaatacttacaaaattaaggataggaggatattatgaatacgtttaagaataaggtgttggcgggagcaattaaggtgcaaaataatgtttatatgaaagcgatctctaatgccatgatggggttaatgccgattatgatgatcagttcgattgcttctttaatcaatgccatcgatattggcaatacacaacaaataatggatcaaataggtcttaaatcattgttgacacaaatcaatgcgatgaccatcgatgtcatttccgtctatgttgccttcttagttggctataaactggcggaacatttgaatgcagatcaattaaacgctggcattatgagtttagtttcattcttgattttaagtcccatcgcaacattcgaagagaccaaagtgatcgagttttcgacgctgggttctagtggaatgttcgttgcaatgttcggcgggatactaggtgcaaggatttatattctatgtgtggaaaagaatctgacaatcaaaatgccagactcagtcccaccaattgtcaataagtcctttgctgcaatcgttcctggagtgattgtttccacgatcatggggattatttatgttgtaatagcagctactccatatggaacgttaacagatatgatctacacgtgggttcaagcaccgctaaccttattgggtgccaatgtgtttgcttgcatgattattgtggcatttattgaattcctatggtttttcggtatccatggtgtattagctgtctatccagtgttgatgctggtcttttatcaacctatgctagacaacttggctgcctatagtgctggccaaccattgccacatttgtttaccattggttttatactcaacaatcgcggcgctcgttcctttgcagtagctttattagccattttcagttgcaaatcagaacagctcaaagctgttgggaaaattggattgattccttctatgtttggaatctcagagccaatcaaatttgggattccgcaggtgatgaacataaggatgttgataccacttatggtaacaccagctgtttctgttttatcagcttatttattaacgattgttggctttatgccttatcataatggcgtcaatatcccaacaggatttccaatcatttttggcggtttcttaacgaatggctggcaagggattatcgctcagctgatccaatttgtgttatgcgtgctgatttatattcctttcatgcgctggcaagataaagcagcactggcagaagaaggaaaaattgcgcaagcataacaagtactgacagcctataaattaaaattaagtgggggatttaagatgaaaaagatcgttttagtttgtgctggtggaatgtctactggtgtcttagtaaataatatgaaacaagcagctcaaaaaaaagctattccagtatcgattgacgcattttcaatcgaatcggtagctagtgtggctaaagatgcagattgtgtgttattaggtccacaggtttcttatcgtttagcagaagttcaagggttagtggcttgcccaacagcttctattgatatgcgaacttacggtatgatggacggacaaaaagcactagaacaagcgctggaattgataggagagtaagatggaagaaaaagaacaaatttgttttcaaattatttccgaagctgggatggcaagaagttgctttttcgaaagtattcaacaaatgcgaaaagagcaaacaaaagaggccctatctgcgattgaaagtggcaagagtcattatcacaaagcacatattgctcatcggcaattggtacagcaagaagcacaaggtgataaagtttggatgtcgttgttattgagtcacgccgaggacttgttaatgagtgcagatattatgagtgagttggccaaagagttcaatttactttatgaagaagtaaatgggctaaagcagatgattgatcagcatatttcttcattgaacacaaaagaataacaatcaaagaagaaagacgtctacgatgagacgattcgagtgaaatcgtggacgtcttttcttggtctatggcaggtggaacatttttctaggaaaaaagataaaaaaagctggtctcaaaacggagcaggcaagaaaagtggattaccaaagcaaatggcactatctctttgagaggatgggatgcatggactcgttcaaagaagtaaaaaagcaaaagaaacatacgaagaacagctcccccatttcttccgttaagaagaaacgggggaaagctggttttcattaaaaaagcccctttttcaggggccagtagggatgatctttctaggaccattccacattcgctcgtttctcaaaggaatagtttattttttcaaggtatacccttggtctagtaacattttttccgttcgttccatgctgatgccatttgaagtatcaccttcaaatgtgacccctggcaattgctttgccgcatcgtagtctaaattactgtaatcgatcgtcaatgattcggttgctgcatcttctccgtaatcaagcgaataatcgatacccttgattgcctgatactgtttggcgatcggatccaataattgttttgcttcctctttcgtagatacgccaacagaagaataaggcatgatattgttggcggtttgctttttcacttcgtcaccttcgtaattgaagaccaactccatttgaactccgttttgttcattcgtgaatgtcttggttttttgactcgctccatttgctccgcaacttgctaaaaagaatatacccaacaacgctataaatcccactactgtttttttcattctatccctcctttttttcatgatagtatactccacctgccagagctattcatatgctcaaaaacaaatagtctttttttgtccgataggcaatccatatcgtcagcgggaaaatgataaattgttgaaaaagttcgtgaattttttctcgaattttcagaagtattcttgttattgtatgcaaacaaatgtaagacgagaggctagtttcacaaagttttttcagaaaagaaaatgaaaagcaaagaatttttaatttgtgcaatcttttattgaaaagagaattacatcttttagtagcaaatactgcaaatgtttgctaaaatagcagtgtcggttaagcattgcttaacaaataaagttttttaaaacttaggaggaattttttatgccagtagtatcaggagctgaattcttaaaagctgctcgtcaaggcggatatgcagtaggtggattcaatacaaataacttagaatggactcaagcgattttagaagctgctgaagcgaaaaaagcgccagttcttattcaaacttctatgggtgctgcaaaatacatgggcggatacaaacttgctaaagatcttatctgtgatctagttgaatcaatgaacatcactgttccagttgcgattcacttagaccatggtgactacgatgcagcaatggaatgtatcgaagttggctatacttcagttatgttcgatggttctcatttaccattcgaagaaaacttgaaattggctaaagaagttgttgaaaaagcacatgctaaaggcgtttctgttgaatgtgaagttggttcaatcggtggtgaagaagatggcatcatcggagctggtgaattagcagacatcgaagaatgtaaacaaatggttgcaactggtattgattacctagcttgcggaattggtaacattcatggacaatacccagaaaactggcaaggacttgcttttgaccacttacaagcaatcgctgatgctgtaggttctgatgttcctttagtattacacggtggttctggtattcctcaagaacaaatcgaaaaagcaatttcaatgggtgtttctaaagtaaacgtaaatactgaattccaattgtcattcgcaaaagcaacacgtgaatatatcgaagctggtaaagaccaagaaggtaaaggttttgaccctcgtaaactattggcaccaggtaaagctgcaatcatcaaagatgcagaagaacacattgactggttcggttcagctggtaaagcttaattctttcagttcaaaagaacgatcacaagtgatcgttctttttttgtggggaaatcctgcttttttctttgtctgttctatgctaaaattggcatgatacacacaaactctaaagtataggtggatatagatgaaaaaaattgtcattcaaggcaatcgtcccttaaaaggagaagtgacgatcagcggggcaaaaaatagtgcagtagcgttgattcctgcggcgattttggctgattctcctgtcgtattagaaggggtgccggatattcaagacgtgcactcattgattgaaattttagaaattatgggtgttcaaacgcactttgaagaaaacacactgacgatcgatccaaccgagatcgtttcgattccgatgccaagcggcaaaatcaatagtttacgcgcttcttattatttcatgggcgcattgttaggcaagttcggtgaaggagtcgtgggcttacctggcggctgtttcctaggtcctcgtccgatcgatctgcatatcaagggattcgaggcgttaggggctacggttacgaatgagcatggcgcgatgtatttgcgtacaagtgaagcggggcttgccggagaacggattttcttggatatggtatctatcggagcgacgatcaatgtcatgttggcagctgtcaaagctaaaggcaagacgatcatcgaaaatgccgctcgcgaacctgagatcattgatgtggcaactttgctgaacaacatgggagccaagatccgtggggcaggcaccaacgagatccgcattgaaggcgtccaagaattacacggttgccgccattcgatcattcccgatcggattgaagcaggcacttatctttctttggcggcagcagccggtgaaggaatcaccatcaaaaatgtcatttatgagcatcttgaaagctacatcgctaaattagaagaaattggtgtgcgcatggatatcagtgaagatgaaatctatgtttatccatcgaaagatttaaagccagccaatgtaaaaacatacccataccctggttttgctaccgacttgcaacaaccgatcactcccttacttttgaaagcaaatggcacgtcagaaattttggatacaatctatgcaaaacgtgtcaatcacataccagaacttgcacggatgggtgcgcaagcaacaacggaaggcaatttgatcttgctcaacggaccgagccagcttcatggcgcagaagtcgttgcatcagacttgcgagcaggagcttgtttagtaattgctggactgatggctacgggaaccaccacagtcttcaatgtcgaatatattttacggggatatgatcatataatcgataaacttacagccttaggggctgacattcaaatggtagaggagtaactatgagcgactatctaacaatggcagaactggagaacaaaacgctaaaagaaatctacacgtttgccaaagaatttcgaattccttattacagccaaatgaacaaaaaagaattatcactggctgttattcgggcccaagcagaaaaacagggtttcttttatatggaaggtatccttgatatcgttggacaggaaggttatggctttttgcgtccaatcaattatggccccagtgcagaagatatctatatttcttcttctcagattcgccgcttcagtttgcgaaatggcgacaaagtagcggggaaagcgagaccgccaaaagagtcagaacgttattatggtttgatgcatgtagaatctgtgaatggcaaagatccggaagaagcaaaagaacgaccgcacttccctgcattgacgccgctttatccgaatcgtcatttgaaattggaaactacccctggtcgtctgtcaacacggatgatcgacatgctggcgccggttggctttggtcaacggggattgatcgttgccccgccgaaagccgggaagactagtatattaaaagaaatcgctaacgggatcactgacaatcacccggatgtagagttgatcgtcttattgattgatgaacgcccggaagaagtgacggatttggaacgaagtgtcaaaggagatgttgtttcttcgacctttgatctgcagcctagcaaccatactcgggtctctgaattggttttggagcgtgccatgcgtttagttgaagacaagcgtgatgttgtgatactgatggatagtatcacgcgtttagcgcgtgcctataacttagtcgtgccaccaagcggccgtacattgagtggcgggatcgatccagccgcattatacaaaccgaagaaatttttcggagctgctcggaatatcgaagaaggtggcagtctgacgattttagccactgcgttagttgataccggcagccgaatggatgatgttatctacgaagagttcaaaggaaccggaaacatggaactgcagctctctcgcagtttagccgagcgtcgtattttcccagccatcgatatcaagaaatccggtaccagaaaagaagagctcttgatgagcagcgaacaattagaagagacttggcgcttgcgcaataatatgactggtgactcattagaattcacggaacaattcctacagtttttaagaaaaacaaaaaccaatgcggatttcttgtctgcttttcatgacgtacattttggcgataaacggccaaaaagaaatctaaaaagataattgcatcgaaaaacgaaacatggtaagatagtcatgttgtaaaatcgacaaatcaactctggtacagcaaatggaccagggcaaaggagagaagaagaaatgaaacaagatatccatccagattatcatccagttgtattcatggactcaactactggtttcaaattcttatcaggttcaacaaagaattcacaagaaactgttgagtgggaagatggcaacacgtatccattgatccgtgtcgaagtaacatctgattcacatccattctacactggacgtcaaaaattcacacaagcagatggacgtgtggaccgtttcaacaaaaaatacggtctcaaagacgcgaacgctgcggaataagaaaaacgctgatataccaacgtttagcagactatctgatagggatagtctgctttttttcgcttttgaccatacttttgaccttctgcaaacttccttgtttttcctctgtggaactcatgaaatctgcaaaacgatttgccgtttcttccgtctgtcttttcgtgacatgggtgtagatatccatagtcgttttaatatctgtatgtccaagtcgaacttgaacttctttgagtgaagcaccggattcaaagagtaaactacaatgagtgtgtcgaaacccatgaggtgtgattcgttttaagttattctcttttataatgatttttaagttgtgatttacatagtctaaataaagcggtttattttcttctgatacaaataggagctgttcaccattttttgccggtttgattcccatttttagaaaatattctttttgcttcaattgccattgtttaatcacttgtaatgtttcagagtctatcgaaattgttcgaaggctcttttctgttttgggaacttggaatttgacttcccatttatcacatgtggctaaggtttgtttgacggaaagggttcttttttcaaaatcaatgtctttccaacgtaaagctaagagttcacctttacgtaatcctgtaaaagctaaaatccgaaaaattggataaataggatctggatagttttttgcaatttcgaggaactccaatagttcttccttttcatagtaaggtgcggaatagcgttcttcgtcaattcgctttttacgttttggacgaattacagcatccatggggttacttcgaatgagctgtaaactcaaagcatacttgaaaaccgatgaagtcaaaccaattaagttggaatatttcttgtaatagctataccaatgatttacttgtttttgacagtatggaattgaaattcttgagattttcaaattgccaaaaagagggaagatatgctttttgtaagctaatttttgggcgacataggtactttcacgaaccgtatttttgtattgttcaaaccactcatctgccaattctgaaaaaaggcgttgtgaatctgtcactacatcattttcttctacttgcaccatcaagcgattgtaagcttttctggcttctttcggtgatttaaacccacgcttggtggtgtatttcttttttcctgtaacaggatcaatgccaagataggctttgaacatataggcgattgtgccatttttcttttgatattttttgatcataattgtctcctttgattcactcgccagtatatcaaagagaagatttactcctttcttatgggtatcataggcagccacaacaggtaagtcaaggctagatttttagactatctaaaaatagttttacatcctcacggtcaaatcgagtttctttcccaaaaggaatgatttttaaaccatgattaatccaactattgaggcgagtatccccaatttttaggtgttgttttaattgtttccttgttggatagggaggcaactcgtttaagtttggttgttgcgtttgttcttcctcaattttttgcttcgttaattgaacaagttcttcaattatttcttgattaaattcaatcggtacagtaacagtcatatttttacctactttcgagattcatttttttatttttgtatagcgaacaatgctttcttgaaaatccatcccttgttcaggatttccaccttcatttatcgcactgtaaaatatcggacgtcttacgagatactcattggtataaagtacgtcttgatttgtggtatcaaaaggttgatccacgagttgctttgtgacgttgggcactttgaggttgcgcgatttgaagaacgccttttttttatgctctttcaaatccaagtctttatcgaagtatttactaatatagcgtccacgattttcgatactatctacatcaatcttgttgattttgacaaatccatgtttccagatggttgtaaggcgattgacggagataaaaggaaaatcaaataaaatgatgtggtaatggatggcacctcgttcttgtttttcccacgtggcaaggtattttaggtttgctttttttgtgtgatagagttcgtagtttagtcgtttgataaattttttaaattcattattcgcatgggcaatgtcttgaatgttttctctgaaagtgagggttaaaaattttgtctgattgtcaaagttcatatccacgagtcgggcaatttcaaagcgcatattttgatagtatttttgttttcgttttaagctgtcgtattgcccttgagcagataggtcatcatagttttttcttttatcagtagtcgtattttcttcttcataaagccaggctagttctttttttcgttttggattggtttcaatattttctgttttttgtttaggagtaatgattgcttcataatcataaatttcaaggtacgtgggagtttcaatgattttttgattataagctttcaaaaatcatcactccttgatgtgtattcagttgtcaaagaaccatcattcttcgcctgatgttgttctataaatcaagttaaggggaagtcctgcaaagcagtccttccagcctatgtgtttattgggcggtcttaacggacagaagcggctctatggcgctgccccgccgtttcgtcctaaccacccaacaaactcataggaaaactagttttgcgtagtggggccttgttttttcggaagcaaagttgccgcatctgccgtggccgataagccatagctgacgaattgaccgttagagcgcccccaaggtgcaatcactaagttggtaaatgtaaccatggctaaaccttgttgggtaagctcttccggtgtaattacaggatgttcagatttgactttgacactgattttttcgtagcggagtttaggtaggatacattcgtaactccaacctagaatttctccgtctttttgccagcgagtaacgttgacgacttggtattctttctcgagtttttcttttggtaaagtgagatcattgattttaattggcataatagccctcctttttatatatacgataatttatacgattaggttaaaaaaatatagacggccatctatgatttgtattttatacgtttgtttatacggagtcaagaggtttagaaaaaaagatatacgaaattttatacgagtgatataataggggaaaatgacaaggaggaagtaatctatgtttggcttattacaaccggataaagtgaaggtaggacaacgaatcaaagaaatcaaagagagtatgaatctgtcctttacagagttgggcaatcgcttagggataaagaaaccaacgattagctcctatgttcaaggctatgcactggcccctgaaagtgtcattaaccagttatctagtatcagtgggaaaccagtaggctggttttactttggtgatattgaagaatatattgcggactatttgcagctaaaagggcagaataggattgtgcaagaacatccagaagttgtgaaaggaattaaagaagagttttacactgggcagtttaaaaatccggcatgggaaaatgaagttggttatccatgtgaggagtttatggatgattatttttatgaactgcaacaagaagtcattaaagaagaaattcaaaaaatggtacgtgatcagataaaaaatttaccgattgccgatgaattatctaaacagaagaaagatgaggcagtcaccgttattacgagcggtatcatcgaatacatggatgtagcaggtgaatttaattatgaaaaaaaagatgatatgattaaactggttaagcaggaagtcgataattacgatttttttgcggatagtaattttgaagatcagtatttagtggggaaactaataaatatcttggcagatcagcagaaaaccagcgaattaatcaaccatttatctgaagagctgacagataaggcatttataggattatttggtggggaagagttggtgaaaacaattcagacgttaagaccggcgttaattaatctgtccaataaaattagtgcagatcagcttgaggattggtttgaaaagtaaaaaaataattgaaattaggagttgatgataggccactaggtgatcaattgaggttgaaccgacaacggatagggctatactatcgagaagatataaattgacttactattcccggtcagattatttcaaaaaaattatatgctcaaatttgcatggtataatcactgatagataacataaggtatatttcagttttttaattgtgaaaagacgataagacattattttatattatcgaaaatcaatcaggttgttttgaaatattgcggatattgtttcgtctttatctattaaaatgttcataaatacaccaatttgttcaaaaggagatcatagataatggatgatatatggatgtttatttctcatttgaaaaaacaataccagaagttaggagtggtagtatctagccaagataaagaaattaatatggatagagtggaattcgtaaatttgaatctacctttaagtgaattacttctgaaaaagagtcggcgaagttggtatctgactgcttctgattttatcaaaggaataatagaacaatcttcagaagaagttgttctgtttgataactttgaattgataatgaatccagaattaggtgtcaattttatggatctattgctagaactaagtaagataaaagttgttttgattgcatggcattatgatattgaagggacaactctcatatatgcacaacctgggcacaaggaataccgccgtattgaaatgagagaagatcaattatttttttggataggagaagaaaatgctgtataaagaattagtaaattttgaaccaattgattcagtcatccaattaacagatgcaaattcaacagaaaaggcaatgcacctgttggatacatacgtaatctcagatcgcatggcagaaacaattaatgaaattatttttaagcaactacaatacactagaccagaagacaacaagggattattggtcgttggtaactatggctcaggtaaatctcatttaatgtcagtaatctcaacaattgctgagtatgaaggtgctagtaagcatattgcaaataaagaagtagctgagcacgctaaacaaattgaaggacaattcaaggtaatccggtttgaaattggtggggtggatcgcccgttcaaagatattattatttcacaactcgaaaaaggctttattgaaatggatgtcaactttgaatttccagaagatgattcgaagttaaccaataataaagaatggctactggaaatgatggatgccttcaatacaaaatatccagaaaaagggttattagtagtcgtcgatgaacttctggattatcttcgttcacgtaaagagttagaaatgacattggatttagggttcttacgtgagttaggtgaagtagcgtatgatagcaggtttaggtttatggctgggattcaggagatgctattcgataacccacgtttctattatgtagcggatccactgcgacgggtaaaggaacgcttcgagcaagtacgtattgttaaagaagatattgcctatgttatttcacaacgtttacttaagaaaaatgatttacaaaaagctaaaattcgtgaacacttaacggagttttctaagctctacgaccgactaagtgagaatatggaaacatatgttgagctgtttccaattcatcctgcatatttatcgacatttgagaatgttcataatattgaaaaacggatagcattgaaaaccatcaccaatgagatgaaaaagattattaataacgaagtaccgatagatgatccaggattagtttcctatgatagttattggacatacattgaggaagacccatcttacaagacaattcctgaagttcgagaagtgatggataaagtatcaattttgaaggatagaatcaatagtgcctttccttcaacaaaaagacgctatcaaaaaatgtctattcgtatagtgaatgctatggcattgaatcgtctaactactgatgatatctattctaaggtagggatgacttctgatgaattgaaagatgacctttttctaacaattcctggtcagatggatatgctgcttgaagatcctgatcctgcgggatttttgaaaacaaatatagatgtggctattaagacaattatggaaacagtcagttatcaatatatttcagtaaatgaagtcaatgcacaatattatctagatttgaaaaaagatattgatgtagatagtctgattgcagatcgtgctgaaatcattgaagcggacacaatggaccgctactattttgatttattacaaaatgcgattgctttggatgaccttacttatatttctggttataagatttggtcatatgagcttccttgggaacaacgccgagtaatgcgaaaaggatatcttttcttgggttctcccaatgagcgatctacagcgcaaccagagagagatttttacatttacatgttacgaccatttaataccgtaaactataaagatgagaagcgctcggatgaagtcttcttcaaacttaatttagaagacgattactttgaaaagacattacgaaaatatgctgcggcaaaagagcagtacattgaaacaacacaagcacaaaaacccttatttaaagctaagtatgatagctactataagcaattgaataaatggctgttcgaacattttgtagatgtattcaaggtggtttataaaggtaaagaaggatatctttctgattttggaatgttccttccacaagaagatactttgaaagcaatggtcaactatgcttctgcagagttcttgaatgatgcctttcaagagaaatacccagattatccaacctttaaagaatataagccaggatatctaacaaatgataatatcaaaacttccgcaagtgatgccttgcaattcttaaatggacgttcaacaaaaactggggaggccatactgaacggcttggttatggaagatagtgctgggaaagtaactgccgaatccatttctagttctggcttttcacgatggattttggaaatgctagaagaaaaaggtaacggcaaggtggttaataataaggaaatatatgatcaagatgccttacgtggtacaggagatagacgtctttcaaaagagtttaaattggagcccgaattagtagttgtcgtgattggtgcgcttctttatgcaggaaaattagagataagcgtagctggaacgaactatacagcaatgaactatcgagagtttgctgccgaaaatatcgagatattgtctaatttcgactatatcaaaaagccatctggtcttccaattaatgaaatcaatgcagtactaaatctatttgatgaatacgccccaaactttgatgagaagattctagaaggatatattaggcgccttagcagcaagtcaattgaagaagtgagtcataccttaaatactattgagatggtcaagaaaggtttttctattggcggcacagaagttatggacgcaaatactcgacaagatacaattatgagactcacttcttataaagacttttgtgaaaaagtccaacggtataataccgttgctaaaatgaaaaacttttcggctagcgttactgaaatctcagaacaagaagaaaacaagaaattaattgattcaattgaacagatgaagaaagacgttgacgaagtcggtacactagtgacatacattacacaggctacttacaactatggccttgagagtgattggacaaagaatgcccaagaagcgattaatgctgtcgttgaagccgtgaagaaaggtgctggattcaagtcgcaaatggatgacttgaaagaaattaaagagcactatatagatgaatattatgatattcatcagaaatctcgattaacaagtaaagaggaaattaatcgtgatgggctacttaattcagttgaggcagatgtattagctacactaaaggccaatatcgacattcttccgggtcaacagcttattgattgggtccgagagctacgtgctacaagagcttgtttttcactaacaaaagctgaactagaacaatatccgacatgtactcattgtaatttcgaaattggaaaaactgatcggaattctaaattggttgtatctaatggtaaagaaaagttaactggaatttatgaaaattggatggagattcttgtaagtagcttacaacagggagacattgttgagaatcgggaactcttgaataatgaagaaaaagtagaaattaatcaattcattgctacaaaagaattaacatttccgattagtccccaattcttgaataccataaataatttgtttaaaggctttgagaaggttgaaataactgaagcggagctggttaaagcaatgggagacggtagtccaatgtcagttaatgaattagaaggacgtatccgtcaattgattgcagagctaactgaaggcaaagagaaaaataaagttagaattatgtttaagaggtgagtagatgtcattagaaaatgaacaattgtcttttgattctgaacaaagggaaaataaaagagtgacagttctcgggatggaatttgaaaatgatgatgctcgtcgagagtatttccgggaggaactgagaaaaaaacttcctgagttgaggaaaattgaaggttttccaataggcaatgatgaggatattattgagctgtctgatccgcctttttatactgtatgtcctaacccatttattaataggtttatcaatgaatggaaaacagaggacgttgaagagtattcaaaagaacctcttgccgtggatattagctttggtaaaaatactccaatctataacgcacatacttatcataccaaggttccgtacaaagcaataatgagttatttgcttcattatacgaaacctggcgatatagtgtatgatgcttttagtgggacaggaatgacaggtgttgcttcttcattgatgaataacaaaaaagaacttcttgaaattaagccggatattacagacaatgatattggtgttagacatgcctttctttctgatttagctccagtgggaagtgttatttctgaggtatataatagttcggttgattccgaattgctggttagtgagctaacaaaattattggctgattcaaagaaagatttaggatgggtttataaaactgaagtaaataatgttgaatatgatattaattacactgtatggagcgatgtatttagttgcccaaattgcttgacggaatttatttattatgaagaggctttcgatattgaagaaaataaattgcattctgatttttcatgtccaaactgtggcatgttattaaacaaacaaaaatctgataaagtaatgtctgagtattttgatgctgtggttggaaaaaaacttaaagttcttaaacaaaaacctgtattaattagttatggatttggtagaaataaaggaattaaaaaaataggcaataaagataaagaacttttagagaagattgataaatataatattaataaatggtttccagcattcaagttacctaagggtgatgagattgaacgagtgaagagaaatggtattgaatatacacatcagttttacacaaaaagaaacttgattgtagcaagtgatttactggaccgaatttctaaactgcctgaaagtcttaaaagaccagcatatttgtgttttcaatccatcgtatatagtcttatctcaaaactggtacgttataatatgggaaatagaggcaacgggatgcttagcgggacatactacctcccttccttaatggcagagactaatgtatataatgtttttaaaggaaaagtaaaggatatagctaaagcattgattgtgaaacaacggtcatcaattgtatttgtcagctctgcaattacaaatgagttacaagagaactcagtggattacatttttacagatcccccatttggagagaatattgattactcagagttaaattttttatgggaatcatggttaaaagtgttcacaaatagttcttcagaagcgattataaatgattcacaaaataaaggtctctttgaatataagcaacttatggaagagtcttttagaaattattttaaggttttaaaacctaatcattggattacagttgaatttagcaattctaaatctagtgtgtggaatgcaatacaagactcgattcaaaaggcaggctttataattgcagatgtctctgcacttgataaaaaacaaggaagttttaaagcggtcacgacgacaacggctgttaagcaggacttagtaatttctgcttataagcctactgaagagaatattgacaaaatgaaggcacaacgtaataatgtggaatcagcttggacgtttgttacacaacacttatcaaatcttccagtatttatgggagacaaaggtgatgcggtaatcatatcagagcgaacaccacgtattctatttgatagaatggttgcctatcatgttcaacaaggtctaccagtcccaatttcttctgctgactttcaatcaggtattgctagtcgttatccgatgcgcgatggcatggctttcttagactctcaagtggcagaatatgataaaaaacgaattcttgcaaaagagtttgctcaattgtcgctatttgtatctgatgaaaatagtgctattgaatggattcgtcaacaattaatgaaaaaaccacaatctcgacaagatattcatccgcagtttatgaaagagattcagcatattgcaaagtatgaagaattacctgagctcgatgagttattagcacaaaactttttatactatgatggagatgaggcagtaccaaatcaaattagtacctatctgacaaaaaattatcatgatttgcgtggcttagaaagagatgacgttttattaagagaaaaagcgaaaaatcgttggtatgtgccaaatcctaatcaacaagccgacttggaaaaactgcgagagaagagcttactacgtgaatttggccattatcttgatgaaatcaataatagcaagaagaaattaaaagtattccgtacagaagcaatccgtgttggttttaagaaggcgtggacagaaaaagaatatcaaactatcgtaacagtgggtgagcgtctaccagaaaaagtaatccaagaagacgataagctcttgatgtactatgataatgctttaatgcgaacagaaatgtaataaatactaattataaagaaacttgatagattctacacatagaggaagtgatgaaaatgaactggataaacgagattacagacaggttcccgcagaaaaagatttatcttgtaagagatgacgatggattactgatgatagataatgttaaggtcgaattgtctgagttagatgtttctgtaataacttatggggatccagttcattttcgttatacatacgaaactaaattcggtagaaaatttgatggaatactacttattcgcttggtagatactgattttcaagaggttccttgggacgtgtaccaaaaagcatttcgtgaatttattggaattactgatatatttcccttcttggactgtaaagctgtgaaaaagctaggcattgaaaactgggagcaattatacaatgcccagcaaagtttaacaacaagacaaaattatgtttcttcaatgaaatttatagaacgtgtgatttaccatgaagctgatgaacacatttcaatgatacttgatccttatgtcgaagatcttacgctatttaataaaaaagctccggtcttgcgtgaatggagcgagattgctagattgattggtgaacatcgcttatatcgtagaacggataaggaattcgaactattagtcgatgatgccaataaaaaatttcaagagtatttaaaaagagattatgacagaaatctttccctacctccggcaaaaaagccaaattatgttaatcaaattttgaattatttatacagaatgcaaggtatttcaaatagaaaattagctttgattgttatggatggaatgagctttactcaatggagtgttatcgaaaaatggctagttaataaaagctttgatttccgaacccaggcaactatggccatgattccaactattacctctgtttcaagacaagcaattttttctggaaaaagacctagtgagttcccagaaacaattaccagaacttcctcggagtcaattcattggcgtgaattttggaaagaaaaaggattcatcgaaaattcaatcaagtatcagaaggggctagggcacacaaactatcaagatactgttcttgagttcagatacgtgggtaccgatatctatgggtgtgtcatcgatgttgtggatggatttatgcatggtgccaagcaaggtctggagacagttcaatcagaactacgaatttggcttgagaagggattcttagagttgatgttacgtgacatgattgatttagattacgatgtatatattacatctgatcatggaaatgtggaggcaactggtattggtcgaattcaagaaggtgttcttgctatgagtaaaggtcaacgtgctcggatatatgattcaggactgcttagatcaaatatacatgactcatatactgaatcaaccaaagaatgggagagtataactttgcccaatgaaggctattttccgttaattgccaaggaaaaatttgcatttgtacctgagggagatataattatgacccatggaggaatgcacatggaagaaataattgtaccttttgtaaaagttataaaaaaggatggtcgatagatgaaaaaaatggtgggattatttcgtgtaatgacatttgaagagttggacaaagctgctgaagtaatggtgaaatattcacctacagacgcatatcaaatattagatgagacctttgccaaaataattaaaggggatacgtttcgcagaaaagctctaaacaatttaatgaacgtatgggggaacggacaaaaaccactttctgattttcaagagaaagtactaaaacaatatgctatttcaaattacgatgagaaaaaaacattgcaagttttgatgctgctttattctttttcatttttttcagacaccataaatataattgggaagtatctacgtatgcaggatacttttcaatcaaaaacgattatggaagaagttcgtagcacttatggaatgactgagacagtgaataaaggtttattgacggtgttaggttccttggttgattggggatttctattacggagcaagcctggtgtatatgaaattatcaatcacaaaattctgattactgacgagtttataaagaacgtgttgatacgctctattttagcccatagagatgttgaataccttccactagaaattataaataatcaagcgggattatttatgtttgattaccaagttagcagattagaagttcgtcatgatgatttaaatgtgttacgagaaagaacggatactttcatagggttaaagtaacgattatatgaattgaaagcaaaaaacaattgtaagctttacatcagtaatttagggaatttagcaattcgttttgcgaaatgttttttttgagttgacaccattccggcttatatctttttgagacaatttacgataggcaatttcaccgattggtatttgaatgacgctttgtttatttacgtagggtctcgttatgctggtattggtatcgctgtgagtcaatgccacagaagtctgtcccagagctacatcagattatttggtaaaatgctgtttttctattgtagtcattgtgctataattaactagctaatactagcaatcatattgttgagtattaggaaatttgtataacaaagtaaagtgatttgacttcaacagaagtaatttgcctgacgtatacagagcttaatcttaatattaatattaagctctgcatactaagtatggtaaccaagactgtcagaagaaccatttcgcacctccaagagtaataatctgttggagaaactttcttagttatattatatactatttgtattttgtgagaatttctcaccccgccatattacagatgcggtaatagccttatttggcagaagtagagcctaggggtcgcgccttaggcagtgtgcaaagtaaattatatagtagcgggactaaatttactgttgttgctccaataaaattagttgaccgagggactcaaaatgaataaagatgtttataaatattcaacaaaaaaatatcttcattttgacaaaatcactagttttaattcaaaggtagaaaagtatgtgtatgagtttgaaaaaaatcctacacatagtttcttacctttgatttttaatgaaatcaatattgaaaaatttagagacttaaaagatgatcctgaaaatgaaaataaaagtagaaatggacggaaagtccctgtcaaagaaaaaaatagaccaattatgtacgcatctcatatagataattatatatataagcattatggactacagttaaatgaattgtataatatctatgtaagcgaaaaaaattttgatagttctgttttagcatataggactaacaaacatggtaaaaataatgttcatttcgcagcggaagtaattaattttatagcagagcatcctaattcttttgtttacgtaggagattacacaggcttttttgataacttagatcatgaatatcttaaacgaatgattaatcgtttatactgtgataatagaatgccagatcatcaatttaagatttataaaagtttgacaaaatattcgtacattcacaaggaagatataaactatttcgttgctccagataaggaaatttatgctagtagaaaaaattcttattttgctagttttgctgactttaggcgtttcaaaaaaatgaaaagtcattattttagtgatggaaaaatagttgttagaacaaataatgatgaaaaaggaatccctcaagggacggcaataagtgcgatatattcaaatatatatatgctggaaatagatgaatctatttccagtttagtaaataattatggcggaatttatcgaagatattcagatgattttattatcattttgcctgacataagtgaagaattattcgatagtttaaggcaagaaatagaaaataatattttcgataaaactaaaatgtctattcaaaaagaaaaaactaatataatgtattttgatggtaaagtattgagaagagtaaatgcgcatacgatgactaagctagactatttaggttttgtatttgatggaacaaatgtgaagatgagggaaaaaagtattactaagttttatagaactgcatataaattaattaaaaaaggagaaattgtctccagacagaaacgacatattggtgacaaaatgcgtttaacatataaacgtaaattatatcaaaattatcatcaacttggagaacgcactgatattaagtatcactataagcaaagggaatttggaacttttattacatatgctcgaaaatcccagaaaatctttgatatattatccccaatgacttgcaacctcatggcttttcaaataagaaatcatcaaaaaaatattcagagaaaaataagagatgctgaaaaaaatttatagcataaacaatatttcggctcgcatatttttgtttaacaaattgacaccattgctttcaaataatttgaaagtcaataaagtttttcgtgtttcattctctttaaaactttgctattaaaggattgtaaagctatttgaaaaaatggttgggctaaccaggtcttaagaaagctcgtaaagcttcataggtttttagtattaatatttgctttataccaataagacatttcacatctaagtttgtgaagcatattcttattgttgatacctttgttgatcctattttgattcgtagcttttagtgacaatttgtggtagtcaatcaccttgacaggcacaatgatcacgtttgtggcgtatgaatggactaatagattccatgatttggaattattgatataataagggaaaatttaacaaagcaaacgtttgttattgatgatatgtataggggcgtgaaaagaagtgtctaaaaaagcaaagaagagtaacaatcctttcttcaatctagcttctgagcagtttgaagaactcaatgatgaattttacaagaattacaacaaagattattattcaataaaattagattctttactcaaaatgattgagtcctcggaatcttactgtaaagggtcaaatatgaaagtaggcattttagaatatgaaagatcttttgaagaagaagaaattttaaaatatgcaaaaacagaattggcggtaacagttttccattgtttggaatcttttttacgtttgtacatggcacattgctctatgagaggatgtccttggttagatttagcggacatgaccttaacaaaatataataacaacatacagaaattgaaaaagcaagtctataatatttttaatttatctgactttaccgatgatgaaattattactgctgtattttatggaagtaagagtgtcccagcggagattattgataagacaaatttgactgaaaaagaaatagtagagcgttttaaaaggtatattcaatttgcggtaacatatctggataacagacaggattataactcttacaagcatgggctacaaataacgcaaaaagaaaatgggttctcttatggtggtacaagaggaacgaatgaaattttatcagtacatggtgattcattaacatatttacaagtaaaaaaagatgacaagaataataaaagatgggttaaaactactaaatggattgattacaaacaacaggcaacacttatattcttttttaatctattaattgctgatgttattgatatttggtcacctgatagggaaaagtatctcaaaactttcccaattgttgtaaccattgaagagcttctagaaaatcgtgaaaactacgtcggtggaaaaataggccgagaaatagaggggttccaagttacagaaatgtcaaggggacttctttattatgaaaatgattagttcagttaaaggaatgctattctgtgatacttaatctgatcgaaaagtcatcaatttcaaagttagcaaattgtacatgacaaaatcgtttcaattcgcatggttttctcgttaaatcgatattatggatttaatattatttgaaaacagttgaaattttacagtgcaagttaggtaatactctttgatattaatggcttttaaagcgtatataaaatctgagtaaatgaatcaggttttacaaaaacggataaaacatcttaactcatatgaaaagtataatatactggcgagtattttttgaccatacttttgaccttctcaatcaaattttactgggttgcattagatttttaaattcctcaagaatcccgtatttacactgttttctgtttattagatatcactagagagcaatccagctctcaatacggtctcaaagacgcgaacgctgcggaataattctaacaaggttagaacgttggtttatcaacgatttagagatgttttccttcactggagacatctctttttttgcgcatgttgcgtttcttgttgcgatattatttaaacttagttcgtcatgaattgtgcaaagcgattacctgtctcttcccgctttttatcagttacatgagcatatacattcattgttgtttttatatctgtatgccccatgcgctcttgaacttctttgataggtacgccagattcaagtaggagactgcaatgagtgtgacgaaatccatgaactgtcatatattctaagttattatctttaagaattttcgttagtcgatgatttaaaaaatcaagatataaaactttgttttcttctgaggtaaaaagtaattgttcttcattatcatgttttatccctagtttgaagaaaagctctttttgctgtaatttccaacgtttcaaaagtttgagtgtctcatcatctaaagataactctctgacactttttcttgtcttaggggtttgaaaaattaatttccaaccatcagcagtagcaagcgtctgtttaacagacaaggttcctcgaccaaaacttatatctttccaacgtaaggcatgtagctcacctttcctaagtccggtaaatgctagaattctaaacatcaggaattcagaaaaaggcaactgtttttttgctttatctagaaaagtaatcaattgtttttggctgtagtagggcgctgcataatcctcttgatcaatgtccatttgtcttttgggtcgaattacaccattcattgggttattagtaagcaagcgtacactaatagcatactgaaagatttgagaagtaatcataatcaaattattgaactttttgtaatagctgaaccaatgatttactttagactgacaataagggatagttatcttgttgatcggaatttttccgaaatgaggtatgatatgcttctttagagcaaatttttgagcagtaagtgtacttgctttcacagtattcttatactgttctaaccacatttctgctactttttcaaagtgaaggttactatcaaaaataaaatcagcgctttttgattttagaagcaatcgagataaagcaagatttgccgcttgtcttgttttaaaaccactacaattagtttttatttctttaccagttaatgggtctttaccaaggtaaacatgaaatttataggcaatttcaccattcttctttttatatttctttattttcgccataaatatattatcgtcctttcttgtccgccagcatgtcgaacgagtggcatcactcctttcaatttggtataattgggtatagcaaataagcattaggtttatttggttttagcacgctctcgctttggtcggtggggcgtgtttttttattgtgcagaagtcatatatgcatcagtaattaattctgcttgttccatatagacatcggtcaatttcgtagcccaatcttcgtaatcttcatatttcccagatccgctagtcaaatgaacatttgccatttcctgtattccttcattggaaatttcagccaactcacttattttgtcgtttgacaattctgctaaaccttctactccgttttgattattaggatattcagcattgtattcatcaactaacttcggtgctgcttctttaattttttgagtgtattcgtctagaatagcttgatattgttcatcagcgcttttgctctcttcttttggagcttggctttctgatgaagctttttctgatgttttatctgatgtcgaagttgcttcttttgagctggtagatgttttctcagcagagtttttatctttagaattacccccaagagatccgccaactgcagcaactagaattaccactaaaatccagaaccatacctttttgtaaaagggtttttttaccttatacaatttaccatcttcgcctctaactctttttgccatttttatttcctcgattctttgatataatatatttgtactgtctcagaaatgaggttagggcttttagaagttggagcttctaagagctttctttttttagcaaaatattttcatgggttcaacgaaaatagattcgctgtcaaaagtaaaaatataattatgatgaaagtgttttgttccgtatttattattccatacgttcaacgcacattctagaagatatggtatagagatacaagtatctctataccatatcttcgtgctttcattcttctttccacacactaggaactgtaggaataaataacgtccttactaaaagaaatcgctcttttagtaaggattatgggcggctcaaagttattacatgtgtacaaaaaataaagaaaagaccatttttgcaataaaggaaccagcaaaaaaagcgagaacaatcaacataattttccaaggttttaaccaaacactattctttttcatctaatcacctctataaaaagaataccatgataaataaataatatcaaaaaaaattgatacttaatcagttattcaccaaatcaggcaactaacgagatgaaatcagaatcagttttgcttttcagagtttttaagttttattgctcgtattaggtggacacaaaagctcgcaaaaaataaaagccctgcaatttttggaatggcaccaattgaagctaaaaataaaaaagctgctataaagtttacacaagcggctagcaggtaaaggtagaaactagtttttcttttcaaagtgctcactccttttgaacagcatatcatactttattttcaatgtgaaaaaataatgtcaaagaaagtcgaaataaataatttcactatccgacgaaataaaaaagaaatagaaagaacttctatttcttcgagcgatttttattcgaatacagggcaatgattatagctacggctatgcaaaagattaatacttttaacatattcacacatcctttttagattagtttaaattataactttctaaaaatatatagggctttaggcctgttagtaaaagataattcagtcccacaagttatcgaactcttttttcgagttttcttacaattggatggttctatttttttcaaataactgttaaaacaaaaaagtgaagaaactactggaactaaaagtttcttcactactcatcaagtaatcaataaacctttgtttattcaaatatgtaacatctaaattttttgaagcaaggaaaaacaaacatacagaacaatagaaagagttgaaaaagtaagataatcgttaaattgacagttccgtaacgctggtaaaggtagatatgtacgagtaattcaccaagattcatgagaatcaagataagataactactcgcttttacttggcatctttttagtagatgatagctgatgtaataatcgagtaggacacaaaaaagtaataatagtttgtttaaagccgtgatggtagcatgttgttcggcaagctgttgaaagaacaaaagagctgtgggaaaagggatataaatgattaataaagaaaaaatatacaacaaaaggcatgttcacactcctaaaaaaaaaattaccaaaaggcagaaaataatttagcaaatttttattcagaggtcaacagtaggatttgttatctcaatgattcgagcattaggcatgattgtttttgcttaagaaatgaaatcttggtttacagactgaggaaaattgcggtgattttctgtcacggaggaatgcaccttgataaaccccgtcacaataaggttataagaggggttgaatattattattaaaacaatgtataaataaaaaaactcctgaaagcagagtggagaagacagttactcttgagttcagaagtttttggtttttgaaaaaaatcaattttatcaatgaaaaatgttatttttgtgcatttaatttttttaatacatcagctggcacatctttttcagcgacctcattcggtccggagatgatacgtttttgactgatctctgctttaactagtgtgttaggagcataaggctggatatcttcaccagacaattcataggtcatttcttgtctttcgccattttctttaacaaattcaaacgtatatttataagaagaatagccttcgattttttttcctgaaccgtctactgtttgtttcctttcaggtgtttcttttggtgtgcgtgcataggcagtgactccttgataggtctcagaatagtatttataactaaaatagcctcctacaccaagtgcgactacaagaagagcaagcatcatttttttcataattaaccctcatttcttttttgctgagacgactataacacggactagcttaaaaaatttattgaaaaagataacactattgtaagcttttgattatttacatgaaaatatagctgtaattttctgtcgaggaattgtgatagaagaaaatagaattgaaatcattttgcaatattgtaatgttaatcttttatttgtgcctggggagaggtacaaatacacaaaaagagaggttttttcatttgaaaaaatttgtattcacagctgttgcaggactaggtttatttatcggaggcactgttgcatctgcagaggaacaaacccatgtggttgctccaggagacacactgtcaggattagcaactgaatatggtacgacagtggatgaccttttagcattgaatgaatccattcaagaccctaatttgatttttgatggcgaaacattgctgatttttagtgatgcacaaccgatgacacgcgcgcaagaaacgacagaaacagcgcaagcgcaaactgaaacagcgccggcagctacacaatcaaacgctgctagcactagcgctgcaagtacaccaagtactggttcaggagtcttgaatccagtggacggtatcaattactataatggtgtcagagaatcttattattcacaaaaagtattagctgggggcggcttaaatattcctggccgacatgttgccgctgacggaacgatccgtgatgcagatggttatatcgttgtagctagtgacaatcaagccaaaggctcaacagggcaatcttctttgggtgcctacaaagtctatgatacaggcgttggtcacagcggaatcgacgtttacacaaactggtaatcagcaaaaacagttgcatgaaatatgcagctgtttttttgttatggtctagactaattcttgtcaaaaaaatgagagtgtggtatcattggactataccaaaacgaaatgaggagcgtatcatggaaattattcgcgtgaaagatgcagctgaaggtgggaaaaaggcatttgaattgattcagcaaggcgttgaaaacggcgctaaagttcttggattggcgacaggcagtacgccagaaacattgtatgcagagatgacagctagcgatgtcgatttttcaaacatgacttctgttaatttagatgaatatgtcggacttggcggcgaagatgatcaaagttatcgccactttatgaatgctcatttatttgacaaaaaaccattcaaggaaacctttgtaccgaatggaaaagccgaagatttgcaagcggaatgcaaacgatacgatgaagtgatcgcggaacatccagttgacatccaaatcttaggaattggtcagaacggtcacattggcttcaatgaacctggggcatcttttgatggcacaacatcagtcgttgatttgactgaatcaacgatcaatgccaacaaacgctattttgacaaggtagaagatgtacccactactgcaatctcaatgggcatcggttcaattttgaaaggtaaaaaaattattttgatggcctttggaccagctaaagcggacgcaatccaagggatgattgaaggtccggtaacgacggatctgcctgcatctgctttgcaaaatcatccagatgtcacagtcatcgtggatgaagcagcggcagccaatctctaacatcaattagttggcagagcgtccaatctaatcgacaaaatccgaatgaacatcggaaaaaccagctacttccccatttcatccagtcggatgaaaagttggtattttcgatgattcttcggtttttttatttttcatggaatacagcttaaagatggggtgcggaatttggaccttccttttttcatttttaaaaatagatggtatagttgaaaaggggtgtttcaatggttgatatggtcttatcgattccagaaattattcttagactcgttttagcaatggtcatgggaggcgctatcggttttgagcgacagtacaaaagtcggccagcgggattacggacccatattttagtctgtatgggggcatgtgtcattgcattgatccaagtagagatcgctagtggggcgatgcgtgatgcgttgaatcatccagatctcgcaggggtcattcgttcagatgaagctcgattgatcgcacaagtggtaagtggggttggttttttgggtgccgggacgattatcgtgacaaaacgctcggtaactggattgacgacagctgcttcattatgggcgattgctggcttagggattgcgatcggcatgggattttatgcgatttcgattactagttttgccgggatcttttttgcactgacggtgatcaagcgaattgtgcgagtcccgacagccaaaaaattggagattcaatacattcatcgtgcggaaacaaaggaatttttgacagagtattttcttgatcgaaaaatcgtgatcgaagatgtcaactttgatgtgaagttcatggaagactatcggatctataccaatatttatacgatcaacttaccgtgggggctgagtttctctgatgttatcgaagaattatcagtttataaaaatatcactaagctgcggttggttgatgttagttaaaaaagtactgccaaaggtcacacctttggcagtacttttttagttaggaaagaaacatgcgatcccgacaatcgctagattgctaagaaagttgactgcttcatttgtgatcaaagcatagccatgcacttttttcgttggctgctggtgatggcttttttgttcggtaaattgatgacaaaccgtgcattggtaacgtacttgaatcgttgctcccaataaactatcgattatactaccgctaaatcctaacaagagtacccaaatcaatgctgtcaaagagagcggttggccgctgagccagagacagatcgccagaagtaaaacgataccgccgctgcccgcaaaagaagcaatggtacctaggaggctgacaccgccagaaagacccgcaggtaatttttttcccgttaagagatttcggggtgcctttttgctcaaaacaccgatctctgatccccaagtgtcggcggtacagctagcgatcccgacaataaatgcccagagataattctcattgttgaaagaggcgtaaccgatcaatgccaataaactaggcgataaattagccagcacttggatggcttcgcggcgcgcacctttgatcaccagatcatcggctgagttttttttctttaagtgattgatgatcccagagctggcaaaaaagaaaccaactaaaaagatactgaaccaaggtcccaaagcaatgatgatcgtcccacttaaggcagctgctaaagcaccggataaagacaaccactgcaaaataaaagcggatcctgctacaaatgcactacagatcagtcccagtaaaaattgatagaaaaagaccacagcttccacctcgcttttttcatcagtttagcataaagcaaacttgtatgtagctttttttcgttactgacagcattttgctcgtcaaatgagagcgtttcatttaagcttagactaagaggtgagtgtatgaaaatcgtgatcatcggcggttcattcggagggatcagctgcgccatcgaagcacgcaaaatctatccagaatctgaaatcgtattgattgaaaaaaaagcccatatcgggtttattcccagcgggatgctcctgtatttagaaggcaagattccttcgttgcaagacgcattcttttgctccaaggaacagcttgagcagttggacattcaagtagcattgcaagaaacaatgttgaaacttgatcctaagaaccatttcgttcaaacagatcagcgcagaatcgcttatgatcggttgatcttagcagcaggatctgcacaagaatcagaaattctcttaccgatgaatgaagccgcattgacctataaagattacggcgctgccaagcaatttattcaggaattagatcaggcagaaacgattacgatcgttggggctggacaagcaggtatggaagcagccaacacattaacgacgctaggaaaacaagtccaactagtggaatcaatgacgtatcctttattcaaatattttgatcaatcgtttctggctccttttttagatgaattagcacaaataaaaaatctgcagctttatctggcagaacctaccattgccattgaatccacggaaacaggcttccgagtggagaccgccaatcggacattgctcagcgcgcttgcattgacgaccgtcaatgtccgaccgcggccgcacccagcatttcagcagctgcgcttgcacagtgatcatacgatttggacggatgcttatttggaaacttccgaaaagggtatttttgctgtcggtgacttgattcagatctacagtccaattacacgggatacggcttatatgccattagtaaacaatgcagttcgttccggaatcgctgctgcgcataatttgcaagagaaaaaagaaccttttcgcggcggcttacggacagtgggaacccatctgtttggctggtatctggctagtacaggaatgactgaatcagatcgcttcttttatgaacaagaaattaccgtcaaaaaatttaccgctaaagcttcattagtagatgacacaccgatccacgggaaactgatcattgccaagacaagcgggcaagtattgggcgctcagttactgtcaaagtacaatctcttagaaaaaatcaacctgctggcatttgccattgaaaaggagagcacattgtcagagttagcgcaaaaagatttcttttttcatcctcattttactgatgtctttgaactgtccaatgcgattgctttaggaagtgctgcaaatgaaatttgaacaattattagaaaaaaaagaagccaagcaattacagctactgaaaaagctgcttctagttggaggtgaactagagcttcatgagatggctgcttaccttaggatcagcaaaccatccttagaaaaatatgttgatgagttatttctatatttagctccttattctgatcaatgccatcttttttatcaaggttcatcattagttctagaaacgagcccagagttctcgttgaatcagattgaatatgtgttctaccactcgtcgatcaaatttcaagtgctggaacatgtattgatcaatcaagaaatcgccacgattccgttagcgcaaaaattaatgattagtgaatcctccctgtttcgcaaaatcaaagaattgaatcaagtgttggcagaattcggattagagatttggcaggggaaactcatgggggaagaagctcagattcgctatttttattttcagctgctttggtacttaaattctttcaagagtcagccattaccgattgatacaaaatttgtgggactgatcgctcgtgggctcaatctgacctttaccgaggaagcacagcaacgggtcagtttgtggctgaagatcatgaagtatcgtttaaaagcgcccggacaatcgtttcaaagactacgggaaaacatggcattttatgagaaagatccattgtatcagcaactgcgggaacttgtctttcgcagttttgggcattatgcactggaagttcgtgaagaagaggcgatgctccattttgttttcttgctttccttttccgttttctctgaacaagattttcgccagtacatgctgcaacgctcccgatttacgccgacagcacttaccgatacgctgatcttggaacatatcctgcatttgtatcgaccggctgtcccgcaagaaatcgaagccaattgttattttcatctttctcagatccatagtcgtttgtattttttcaaaggagatgtcgaagtttttgatcgagaaaatatttggcaattagaagcaaaactctcaagtcgtaatattcgccagatcagtgaacgtttattgaatactgctgtacaagaaatgaagctggaagcatcagaagaaaatacattgtatatgatgaccatggtcaaatatttgagtgtcctgacgatcattgattaccaaatcaatcgggaatttcgggtaggcatcgcgttgaatatggatgcacttttcaaagaggcagtcttttatatgtggctgctgtacttaaaaaatttgaatggggtcgtcgttgagcgctatgctaaagaacaagactatgatctgatcttgacgaattatccgattgaaacatcgattcctacatatcggatcagtgagttagggacgacttacgatcgagaaaaaatcaaaaagatgattcgcgaacgcttcaactaatggcgtttttccagatttcgtcaatttcttagaaaatctctaaaaagttgacgagatcactacaggtaattcgagtaagataaatgtaagaaaacggtatcaaaagaataaatcaaccatttaaaaggagagagaaacatggcagagaaaaactatattatggcaatcgatcaaggaactacaagctcaagagcaattatttttgaccgcaacggacaaaatgtcggtagttcgcaaaaggaatttccccaatattttccaaaatctggttgggtagaacacaatgccaatgaaatctggaactctgttcaatcagttatcgcgggagcctttatcgaatctgggattcgacctgaagcaatcgccggaatcgggattaccaaccaacgggaaacaacagttgtttgggataaaaataccggtcaaccgatcgccaatgcgatcgtttggcaatcgcgccaatcttctccgattgctgaccaattgaaagccgacggacatacagacatgatccatgaaaagacagggttagtgatcgatgcttacttctctgctacgaaaatccgctggctgcttgataatgtggaaggtgcacaagaaaaagcagagaatggggatctactattcggtaccattgattcgtggcttgtctggaaactgacagatgggcaagtccatgtgacggattactccaatgcgagtcggaccatgctttataacatccatcgtttagaatgggatcaagaaattttggatttgttaaatattccagcatccatgttgccggaagtcaaaagcaactccgaagtttacggccatactcgcagctatcatttttatggcagtgaagtaccgattgctgggatggcaggggaccaacaggctgctctctttgggcaaatggcttttgaaaaaggcatgatcaaaaatacgtacggtacaggggcgtttatcgttatgaataccggagaggaaccacaattatccgacaatgatctgttgaccacgatcggctatggaatcaatggtaaagtatactacgcattggaaggtagtatttttgttgccggctcagcgatccaatggttgcgggatggcttacgtatgatcgagacgtctccgcaatctgaagaattagcggcaaaagcgactggcgacaatgaagtctatgtcgtaccagcctttacgggattaggtgcaccttattgggattctgatgctcggggagcagtttttggcttgacccgcgggacaacgaaagaagacttcgtgcgggcgaccttgcaggctgtcgcttatcaatcgaaggatgtcatcgataccatgaaaaaagattcagggatcgatatcccattgttgaaagtggatggcggggctgctaaaaatgatcttttgatgcaattccaagcagatatcttagatattgaagtacaacgggcagccaatcttgaaacgacagcactgggggcggcttatttagctggcttggccgtcggcttctggaaagacctcgacgaattgaaagcaatggcagaagatggtcaactctttacaccagaaatgccagctgatgaacgtgagaacctttatgaaggatggaaacaagcagtggcagcgactcagatgtttaaattcaaagtgaagaaagaaggcgagtaagccatgactttttcttataaagatcggcaacacgccctagcagaagcaaaaaatacgacctatgatgtattgatcattggtggcggaatcactggtgctggagtcgccgtgcaaacggcagctgccggcatgaaaacgattttggtagaaatgcaggattttgctgaaggaacctcctctcgttcgacgaaactggttcatgggggcatccgctatttgaaaacatttgatgtcgaagttgtggcagatacagtgagggaacgagcgatcgtgcaacagatcgctccccatattcctaaaccagatcccatgcttttacctatctacgatgagcccggtgcaaccttcaatcttttttctgtcaagattgccatggatttgtatgatcgtctggcaaatgtaacagatagtaaatatgccaattatacgttgacgaaagaagaagtattggaacgagaaccgcaactgcaacatgagaacttgaccggaggcggagtctatctggatttccgcaacaacgatgcccgtttagtgatcgaaaatatcaaacgggcccatcaagatggtgctgcaatgatcagcaaagccaaagttgtcggtatgcttcatgatgaacaaggaaaaatcaatggtgttcaagtagaagatcaattaacgaaagaacaattcgccatccatgcgaaagttgtgatcaataccactggaccatggtctgatatcgttcgagaattagatagcaatgataacttaccgccgcaaatgcgcccaaccaaaggtgtccatttagtggtggatcgtgaaaagctgaaagtacctcagccaacttattttgatactggcaagaatgatggtcggatggtttttgtggttcctagggagaacaagacgtattttggtacgacagatacggattacacgggcgatttttcccatccgactgttacgcaagaagacgtcgattatcttttagagatcatcaaccatcgctttccagaagctgcgatccaactggatgatattgaagctagctgggcggggttacgcccgctgatcacggctaatggcggttctgattacaacggcggagctaagagcaaactttcggatgaaagctttgatcaaatcgtgcaaactgtagaagcgtatttggacgatcaccgcaaacgcccgcaagtcgaaagggcgatcaaacaagcagaggaacgtctagaagccagcagtgtggatccttcacaagtttctcggggcagcagcttggaaatgtctcaagacggactgttgacactggccgggggcaagattacagattatcggttaatggctgaaggcgccgtcaaacgaatcaatgaattactggctgcaaaagggcagcagtttgaattagtggattccacgcgttatccggtgtctggcggcgaaattgatccgaccaatgtcgaggacgaactggcgcaattggcgaaaaccgccgaagctgccggtttttcccctgaagatgcacgatacttggccgatctttacggttcaaacttaccgatagtccttacctataaaaccacgtttgcggggctggacgaaaaagaaagcacggcattgaattatgccttgcaagaagaactggttctgacccctgtggattatttattgcgacgaaccaatcatgttctctttatgcgagatacgttggatcagatcaaagttggtgtgatcgatgcaatggcggattattttgaatggacagctgcagacaagcaaatgtatgccgaagaattggatcaagtaattgcggaatcagatttgagtgccttaaaaggaggagaatgatatgagtgatgcaacacaaatctttagtgaatttctgggaacggcaattttagttttactgggggatggtgtttgtgcggcagtcaaccttaaaaagagtaaagcagaagcttccggctggatcgtgatcgcgacaggctgggcaacagctgtgacgattgctgtttatgcctctggtttcatgggacctgcccatttgaaccctgctgtaacgttgggaatggcaatgacgggtaatttttcttggggattggcggtacctttcatgttagcacagttagcaggcgggatcgtcggtgcaattcttgtttggctcaattacttgccgttatgggatgaaacagaagatcaaggcgctattttagggacatttgccactggacctgccgttcgtaacttagccgcgaatacgatgaccgaagtgatcggtacgtttgttttagtatttggcttgttggcatttggtgcaaatacctttacggatggcttgaacccaatcgtagtcggaatcttgattttggcgatcggtctttctttaggcggaccgacaggatatgccatcaacccagctcgagatttaggtccgcggatcgcccatcaaattttgcccatcaaaaataaaggaacatctgactggggatatgcgtttgtaccaatcattggaccttttatcggtgcagcattggcagccggactattcatgattttaccgctctaattgactcattgatcttttaaacgatagcgatctgctagatggctatcgtttcttttttttgataaattccttcggttgattgaattcttccagcgaaagtggttaaataaagaagctgaaaaaagagcaaaggagcatgtatgtgaaaaaaattttgcgtgtttgtttatggcttgtcggtattctagtaacactagcactagtcgtactgattgcttttcaagtgtcgcctcgtccaggggcctatctgattggaaaaatgtttaatgacgaggtgaagatcacagatgaaaccgcgtatcaaaaaagtttgcctcatgtgacggtaaaaaatgatctgacctatacttctgactatgatcgtagtacatttgacctctatcatccccaaggtgcttcgaaagtaccagttgttttctgggtgcatggtggtggttacgtcggtggtgataaggaaggggccaaagaatttgcgacctacttagcagatcgcggacaagtggcagtggtttcattgaactatgagtgggctcctagtctagaatacccagggcaagtcaaacaaatcaatcaagcctatcaatcgatcaagaaagaggcagcgcaatatccaatgttagactttaaaaaagtcatttttggtggagactctgccggctcacagattgctgggcaattcttagcgatccaaaccaattcggattacgccaaagatatgaagatgacgcaagtgatcccatcaggagatataaaaggattcatttcttattgcggacctgttgacttgaagcaaatggctcatcaaacttctgatgatcgcttcatgaaattctttgttaaaacagtcgcgtggtctttattaggaaccaaagattggaaaaacagtaaggaattgcagcaagtgtcattagtcaataaattgaccaaagaatttccgccaacctatatcacggatggcaatgcctattctttccaggatcaaggaatcgcttttgatcagaagcttcaagagctagatgtgccagttaaatctctcttttacaaagatgttcctgaggcagtcaatcatgaataccaatttgattattcgctagaagaatcaaagaaatgtttggatgaaaccctcgacttccttaaaaatgtgatgctgtaaggcttcaaaacgcgaaaaaaagttgaccctaataaaaggtcaactttttttaatctcctagaccgatgaaatagtcatcatctttcattgcttctaccgttcctaatagatagccattccccacttgagagaagaaatcgtgattgctggttccggtagagataccattcattacgatcggattgacatcattggccgtatctggaaacaggggatcttggcctaagttcatcaatgctttgtttgcattgtagcgcaagaaggttttgacttcttccgtccagccgatcgcgtcatacaattcttcggtgtaccgttcttcattttcatacaattcatacaacaaatcgtacatccagtccttcaaacgctgttgttcttcttcaggaagctcattgaaacctaattggaatttgtagccgatatacgttccatgtaccgattcatcacgaataatcagtttaatgatctctgcaacgttagccaatttattattgcctaaataatagagcggtgtataaaaaccggaataaaaaagaaacgtttctagaaaaacactcgcaattttcttttcaaggggagtcccgttcttatagatctcattgatacgttctgcttttttttgcagatagggattcgtattggtccattcaaagatttcatcgatctcggcttttgtattcaatgtgctaaagatagaagaataacttttggcatggacagattccatgaattgaatattgttcaaaacagcttcttcatggggcgtgcgtacgtctttacgcagctgatccattccgctttctgattgaaccgtatcgagcagtgttagcccgccaaatacataaccaaccgttgttttttctagatctgaaagtgtccgccaatcatctaaatcattggataatggaatacgcgtatctagccagaattgttctgtcagcttttcccaagttgatttatcgatgatgtcttcaatcgcattccagttgattgcttcataataagttttgcccatcttaggttcctccaatagtagtcttgataccagagacaagaacaaaaggagcctacctgattgtcagtcgcaaatgccttcaacctttcgggaggatctctaatccatctcgatcatgctttggtgaagacatttgattcaatcaggtagtttttttgttcttagtcagtgcttagcttagcgtgcatgattaaatcacacagctttcgcattgattgctgccgatttcttctgcgtcatccgtaaaggtccgtacataataaatcgatttgatccctttatggaacgcataatgacgcagaatgttcaagtcacgggttgtctgtttactggtttctttccattcatagagcccttctggaatatctgagcgcatgaagagggtcatactcattccttgatccacgtgtttttgtgcagttgcataaacatcgataactttacgcatatccatatcataggctgagcgatagtaaccaatcgtatcattgctcaagtaaggtgcaggatagtaaatcttcccaattttcttttcttgccgttcttcgatcattcgtgtgattggatggatactcgcacttgtatcattgatataagagatagaaccatttggcgcaacggctaaacggttttggtggtacaagccgtcttttttgactgcttctgccaatgcggcccaatcttctccagaaggaataaagacaccgtcgaacaacgctttgattttgtctgattttggttggtaatcccctgtgatatagtctgtgaaatagctgccatccgcataagctgatttctcaaagttatggaacacttcgccccgttctttggcgatgttattgctttctacaagtgtccagtagttgagcaacataaagtataagtctgtgaattctaatgattcaggagaaccatattccatttgattcttcgcaaaataggtatgcaagcccattgcacctaaaccaatcgtatggttcaacgcatttccattttgaatagaaggaacaacgtcgatgtcagaagcatctgtaacaaaagtcaatgcgcgagtcatggcacggacggattttccaaaatcaggactgtccatcaaattgacgatgtttgttgaaccaagattgcaactaatgtcggtgccaagcacttcatattcttgtttgccgttgattacagaaggttcttgaacttgcaggatctctgaacaaaggttactcataatgattttgccatcgattgggttggaacgattggcggtatcaatattgatgatgtaaggatagccagattcttgctgcaatttcgaaatttcattttcaaggtcccgagctttgatttttgttttacgaatgttaggattcatgactaaattgtcgtattcttttgtgatgtcgatgtaagagaacggaataccgtattctttttcgacactgtatgggctgaataaatacatgtcttcatttttacgggtcaattcatagaatttatcaggaacgatcacaccaagagaaagagtcttgacccggattttttcatccgcattttcttttttggcagataggaaactgatgatgtctggatggaacacgttgagataaacgacaccagcaccttgccgctgcccgagttgattggagtagctaaagctatcttcgaacaatttcatgaccggcatcacaccactggcagcgccttcgtagcctttgattggcgcaccagcttcccgtaggttagacaacgtgattcccacgccgccgccgattcgagaaagttgcaatgcggaattgatcccccgaccgattgcgttcatatcgtcggtcaactggatcaggaaacaagaaaccaattcgcctcgacgtttgcggccagcattcaaaaaagaaggtgttgccggctgataacgctgatagatcatttcatcagccaaagccaaagctaattcttcatctccatctgcaaaatagagggcattgaatgctacacggtcctcatagctttccaaataggctgttccatcattagttttcaatgcatattgagaataaaatttgtacgctgccatgaaggacttgaaggtaaaatgctgttccgacagaaactgataaagttcttcgataaacgcaggacgatacttacgaatgaaagcttcttctaagtagtcatgttcaatcaagtaatcgattttgtcagtgactgaatcgaaagtcatcgtatttggctcaacattttctttgaaaaaagccgccagggcttctttatctttgtgtagagggatctgtccatcaacggggcggttgatttcattgttcaatttaaaatagcttacatctttgatttctttcaagctcataaaaagcaacctctttccttgttttgatcgtataaaaaaggatctgcaggtcttgacgactgacaaatcctccaaaaacacattggttaagttactgcttagctggccaattgacgtaattgatccggacggaagccaatgattgtttgtgcatcagaagtgatgatcggaacgctttggaatccttgttctttcaaaaactcaattgcttcaggctggttgtcaatattgatttcttcaaaagaaatatgattatcgcttaaaaagcgttttgccattttacattgcatacagttgttttttgaaaatagtttaatattcataatgatttcctccgagtcagtagtagttataaatctagtataaataagtcttggagaaagtcaacggaaaaacactatatctagtgcttgtgaaaattacatacacaatttatagtgtttagccagtttttatacagccaaaaaaagctgatttttcctagaaaatcgcgatttatagccaaaaagatccgagaatatgcaatggagttgagtaaaaaaagtttgaattgtgaacgaacattcaagatcctttttgaaacagattgactttagtcctaaatcgctctattataatgataatcattctcaattaagtagaaaactagtaaaaatcgttcacaagaggagggagaaatcatgaaaatggcgcaaacagaggcttctagagtctatcaaatcgaagcgatcacgacaccaaagaacgtcacggcgcatttaaatgatttgggtcttcgggtaggcgttgacattctcatggttcaaaaaaactgtaaaagcggcatcatcttgcatcgggacaaccggatcgcattggatgccagcgtcatggagcagattgacgtgtccgaaagacaacagcagacggttttgacttctctagatcaattacatgtaggagagcagggcaaggtggtaaaaattgcaacgactggtgctttgcggcggcgattgatggatatggggatcaccaagaatgtgccgattcatatcgtgaaactagcgccactaggtgatccgatcgagattcgcttaagagggtatgaattgtcgctgagaaaacaagaagcagctttcgtctttgttgaaaaaggagtagaggaatgacctatcaattcgcattagtcggcaatcccaatagcggcaaaactagcaccttcaaccaactgacgggggccaagcaaaccgttgggaactggccgggagtgacagtcgaacgaaaatcaggaaagctccgtaaagccaaagaaattaccatccaagatttgccgggtatctattcattgtctccttatactcctgaagaagtgatctcgagaaattatttggcagaagcccccatcgatgcggttttagatatcgttgatggcacgaacttggagcggaatctctacctcactttacaattgttggaaatgggtctgcctacaatagtgggaatcaatatgatcgatcttttaaagcgcaaagggatccagatcaactttgagaagctagcctatggcttaggcgtaccggttgtgggaatcagtgccttgaaacaacagggactgaataagctgatcgatgctgcaaagaaaagagcaggaaatggtcagtcaagcgtcatctacgattcacgtttagaggcggctttagcagagatcattggtctattgccaactgaaattcccgagagcaaacgacgctggattgctgtcaagctgtttgaaggtgacgaattgattcgtcaacaagtcgctttgactccgagcgatgaaaaagaattagcggaaatcattaaaatcacggaaatgatttttgatgagcaaagcgatgcaattatagtaaacgaacggtatggattcattcaacaattgttagctttagcaacagtcaaggaagaagagtaccgcttgtccttaagcgacaaaatcgaccgtgtgttgacccaccgcctactggcactaccgatttttgcccttttcatgtggggaatctacttcttatccatccaatcgatcggtacgatgggcaccgactgggtcaatgatgtcctgtttggcagcttagtcccggatattctgcagcagctgatgaaccaatggcaagtagcccaatggctgcaggaattgatccaagatgggatcgtggcgggtgtcggggctgtccttggatttgttccacaaatttttgtgctctttttctgcttggcgttattagaagattgcggctacatggcacgcatcgcttttgtgatggatcgcttgttccgcaagtttggtttgtcaggaaagtctttcattccgatgctgatcgctactggctgtggtgtacctggggtcatggccagccggactattgaaaatgaaaaagatcgccgtttgacggtcatggtcacgacatttatgccttgttctgcaaagctgccgatcattgcactgatttccggggcgttctttcccggcagttcatgggtcgcaccttctgcgtatttcattgggatgggggccattattttatcaggtatcgcattgaaaaagactgctctctttgccggcgacccagcacccttcatcatggagctgcctgcctatcatttgccgcaactaggaaccgtgttgaaaagtgcgattgatcgggccgtagccttcatcaaaaaagccggaacgatcatcttcgttgcatgtatctttatctggtttacttctagctacaactttacctttgatcgagtgggggaagaagaaagcatcttagcctttttcggccgtttgttagcaccgatttttgcgccactaggctggggcacttggcgaggtgccgtggcgaccattacaggattggtggcaaaagaaaatgtcatcgggacttttgggattttgtacggccaaagtggggtttctgaaaccggtacagagatctggcaagtgctgcgaggcgattacaccccagtagccgcctactcctttttgatttttaacttattgtgtgccccttgttttgcggccatcggcgcgatccatcgtgaaatgggggatagcaagtggacttggttggctattagttaccagtgtggactggcttattgtgcaagtctgattgtttaccaattcgggcatatcttctttgaaggagggcaactgacagtaggaaccttggcagcgttgattgttcttggtttgttgctgtttgctctgataaagagaccccaacaaaaaaattcaccactattacaagtagtcggagaagtagtaggaggcgaaaaatgattgcaacgattcttttaagtctagtgatctttggctatgcaggaaaagtgctttatcgaatggtcaaaaaaggcagttgttctgattgccatcaaagctgtccagtaaagcaagaagagaaaatctaaaaattatccatgaatctaacgccagttttattaggtaactagcgagtatgagtaaagcagttaggcagaaatgcctagctgctctttttatgagaaagggctatcaaaagaactgattctttagtatgattaattatatacatgatatataggtttgttttattaaagaaagtaagcagaaaaacagcatgaaacgaaatgtagataaagcaaatatcataaacagtaatgtaaacaagaacgagcgaacgttgataatgaaagttacattgggaaggcggagagcagcaatgaggcaacaacgaaggattgaacaacggaaaagacagcttctatgggcattgagcataagtttactgcttgttacgattgccgttagttattggctgattcacaccatgcgtactgggactgattcgtcaacaagctccccagataaccaagtgtcactttctacttccagccaagaaacaacaacggcctctcaatcgtcgaaaattactctgacagcaagtggcgatatgctctatcacagaccagtttatatgagtgcatttgatgggaaacgctatgattttgacaatgactttgagcaggtgcaaccgttgatcgcttctgccgatattgcttttggtgactttgaaggcaccatcaatcccaacaaagaactaggcggttatcctacctttaatgcgcctccgaatgtagtagaaagtatcaaagcagctggttttgatgtgattgatctagcccataatcatattttggatactggaatcgaagggcttaaaacgactgctaatgcttttcaggagattggattggagccgattggtgtcaatgtaaatgatcaagggatattcgtcaaagaagccaatggcatcaaagtagcgatgctggcttatgcttacggattcaatggcaatgaagctagcttggcaccggaagaatatacgacctatttaaaagatttatccatggaaaaagtagcagctgaaatcaaagaggcagagaatgtagccgacatcaccgttgttatgccgcaactcggtgtagaatattccttagaacctacagaagagcagcagaagatttatcgacaaatgatcgacctcggagcggacatcatttttggcggtcatccacatgtcgctgaaccaacagaaatcatcgaaaaagacggcgagaaaaaatttattctctattcaatgggaaatttgctatccaatcaacgctacgaaacagtcaacaactattggaccgagcgaggggtcattccagaagtcgagctcacaaaagaaggtgatcgtacatttttgagtgatatcaagctgcatccaacatgggtctctaaagagccgatccctgatcgtagatatgacgatccagagtttggcactaccgaagcctatgattttcaagttgtactggcagaagaatatcttcctggggggaagtatgcggataaagtacccgaagacaaacgccagcgaatcgaaaccgcgtatcatgaaatgatggagctgctaaatttaaaatggaaataagcagctgaatctgtctcactaacctatgacaggtatcaagcaggcatcttttgaggtaagatgtctgcttttttgctgttttatttagtagctcgatcatcttgcagcagatcttttaggagcatttagcccgctttttctagtaatgacacccacaagttgaacagaatgacaatcactgagagcagactagttgctgtaagttgataaaacagcaaaattcagcaaatttcattggctacagttcagtttttcaagcttttttctagaagagatgaacgcaatcactattgccggtaccagtgatattgcttatagtaaacgcatacaagaagactcgagaattctttgtacgagaggtggttaactttgttaagcgaattattaaaagaagactatatccaattggatatctcagtagaaaattttgacgaagcaatcaaggcatccgcacagccgctattgactgccggtgtcatcgaaaagaaatacatttcatccatcctttctatttatcatgagatagggccttatattgttattacgaaacaaattgcgctgcctcatgcacccatagagaagggggcaaagaaattagcattaggcttcactcgattaaaacgacccgtcatttctggtcatgaatcaaatgatcctgtcaaatttttgtttccccttagcgcaccagacaatgaatcccatatttcattgttatccgaactggctgagttgctgggcaacaaagactttctggaattgttaggacgaatgactgaaaaaaacgaactaattgcatttctaaaaaaatttgaaggagagaataactatgcataaagcactgattgcctgtcgagcaggcgtaggctcaagtctgatgttaaaaatcaaagtgaatgaggtcatccgggaaaatgactttccaatcgaggtggaacatgcgtctttagatgcggtctctggttttacgggagatctgatcattactttgacagatgttgccaatgaattaagagaaaaaaatttgcagcaaactatcattggaatcaacaatatcgttgataagaaagaaatcaaagaaaaaattgcagccgcattagtctaaaaatcaatgaaggagaaacgctcatggatttaattattagttttcttagtacgccagccgtacttttaggtttagttgcaatgattgggttattggcccaaaaaaaatcaatgaccgaagtgttgactggaacctttaaaaccatcatcggtttcttagtattcagttccggcggttcgatcatgactggcgcactacagaatttcaataccttattccaaaaagggttcaacatcgtaggggtcgttgcatcaccagaagctgccactgcactagcccaaacagaatttgcatttgtgaccagttgtacattgattctcggctttttgatgaacttagtcattgctcgaatcacgccatttaaaaatattttctttaccacaggacatagtttgtttttcgcttgtgtgttgtcactgatcctaaaggctcatcagtttgctgatattccagcgatattaattggcggaacattactcggctttttctctgctgcgttacctcagctgtgccaaccatttatgcggcgcattactggcagtgatgagaccgccattggacactttaacatggtgggttatgcattgtctggttacattgggatgctatttggtaaacacaaagataaaacaacggaacacatcaattttccgaaatggttatccttttttagagacttcttgatgggcgttgcggcagttatgctagtgctattctatatctctgcattaaaagcggggcgagacgtcactcaagaattagcaggaacgactcattggctggtctttcctttcgtgcaggcatttacctttactgcgggaatgtcgatcttgatgactggtgtgcgcatgttcttgtctgaaattacggcggcatttgtttcaatctcggaaaaattcattccaaattctcgtccggcattggatgtaccaactgttttcccatttgcaccaacggctgtcattgtagggttcttatcctcttatgtcgctggcttattgggagtattgatcatggtgcttttcaattttccagtcgtgatcattccagcagcccatatttgtttcttctctggaggaacagccggcgtttttggaaactctactggcggttggcggggagcgattgcaggatcctttgtcatcgggctgttactcgcctttttaccaacagttctttacccggtgtatggtagcttaggcatcgagggatcgacattcccaaatatcgactacaatgtcatgggaattttattagataaactattaagtttgtttggtcagtaatcgatcgctaagatatttgtcatcaactgaacttctgaatctttgcacgcaaaaagaactatctcaaagtgtgcaaagattcagtgaaaacggatcagtgacagaaaggattttatatggaaacaacgaatttggcttattttttgcaaacaaccaaagatgagcttacagcttatttgaatgagatcaatcaacaacagttgatcgatgcagctgaactgatcgttgctgcaaaaaaaaagaaggggcgtgtgcatgtgactggcatcggtaagccaagtcatgttgcggaatatatagcagctttgctttcttccacaggcactcctacctattttttagatggaactgaaacgatccacggctctgccggccaagccgaaaaaggggatgtcgtgattgctatttccaatagcggcgaaacagaagaattgaaaaaatcgcttcttacgctcaaagctttaggaataaaagtcatcggagtgagtggaggtatcgactcatggctgcaaaaacattccgatgccttcttgtttgctggtatcacgaatgaaggagatccgttgaacaaacccccacgaatctcgatattggcagaaatcatcgttttacaaagcttgtcgattttactgcaacaagaagccgccattgatattgatgattattatgcatggcatcctggaggaagcttagggagtgctatcatgcaagaaagaagtgtcgaagaatgaagatcgaaggaatcattacagccatggtcagtcctttagatgagcagggaatcgatcgagcagccactagaagactagttaatcaattgattgcgaaagggatccatgggttatttatcctagggaccaatggggagttttatgccttatctcatgctgaaaagctcgaattggcaaccatcgttgtagaggagacagcaggtcgggtaccagtatttgcaggagcaggtgggatttcgacagaagctgtcattgatttagtgaatgaatttcaaaccattggagtcacagcggcttccatcatcactccttatttgatcaagcttacggatcaagaagtagtccaacactataaaatgattgctgcaaagacaaaactcccattgattctctacaatattcctaagaataccggcattgcgatcaatgaaaccatctttaacgcattgctgaaaatacccactattattgggatcaaagacagcagcggggacatagaaaacctcaaaagctatctcaaattgaatgagcgagacgatttttctattttagtaggttctgactctttgatcttggaagcgttggaatgtggcgctgatggggcagtcgcagcaacttccaatgtcttaacgacaactgacttagctatttatcacgcatttaaaagtggtgagacccagaaagctagaaactatcaattaagtattgaagactttcgccgtatcttaaagttcggtacagtacccagtgtcctaaaatactgcgtaggttggatgggaattcctgtcggtgatcctaagctgccggtgctgccagtagatgaacaggactatccagagatccatcaagttttagcggaatatcgaaaagtggagggattcgatgaataagaagctcgtgatcctcaaccggatccataaagaaaaaatcatggcgatcgtacgggtcgaaacagtggaacgagccgttgaaattgttgaaggctgtaaagccggtggtataacttgcttggaaatcagttatacgaataacaatgccggggaaatcatcaagcaactgaaagaaatctatcaagacgaaatcgttgtcggtgctggaaccgtattggatagcgaaaccgctcgggatgcgattttacatggtgctgaattcatcatctcaccggctttttcaaaagcagtcgcacagataagcaatcgctatcaaatcagctacatgccaggctgtacttctatctctgaggttttagaagctctcgaagcaggagcggatatgatcaaagcatttccaacgtcttctttacatgggccaaggatcgtctcaacaatcaaaacaccattgccgtttgtcccgatcttatcttcagggggcgtttctttgacaaatgttacagaatggttgaatgctggtgtagaatgtatgggagtaggaacattattgacaaaaggttcgcaagcagaaattgcaaagaatgcggcacgattgcgcaaagaaatcgacacatttgtgaattaacaaagagaggagagagggtcatgatcgatcaacgcacattacagctgatacagaaaatgattcaaaaaccattgatggaacaagaggagataatgcgcttcttttctctgtcaaaaaatcaattggattatgcaatcagaaaaatcaatgaactattaaaagcaaataaacagccgttgattcgatcagatccttattttattcaattagcaccaaaggcaaaagctttttttctgaatgatttcctaaacggtgccgtttatacccagtatgagatgaatagtgaagaacgaaaaaaatatatttttctgatgttgttttattatgaatcagactatctttctgtgaatcacttcttgtctgcgctgcgtgttggcaagactacctttatggcggatatgaaaaaattagaaaaagaactgtctctgtcaatgatcactattgggtatacgcggaagaacggctatgggctgattgggaatgaagaaaatctgcgtaatttttttatgaagatgatgtttcatgattttggggataatcaggaggagtttgtctatcattatttcttggtcaatgaaaaaattgatggcttctcacaggtcgagggtatcgcaagagaaaaactaaaaaccttttctttagaattagtggagaatcgcttgaatgaattctcttatttgtttacgatgatccttcctcgtttaaacaaacagtggcaagatttttatgaaacctataattaccagactttttttcagatgaaagagtatttatttgcaaaagaattattaatggaatttggtatcacaaataaatcagcccaattgtatgtctgtgggtggctgctggggatggcgctaggggataccacttatccatcagcggatttttcgattattcatgaactggtcgagcgcatcatcaaacgctttgaactattgtccggcatccgttttaaagataagcaaaaagtcatcaatcaattatatagtcactttcgaccagcttattaccgcttgtttttttcaattgccaattatcaatcccttacataaaaaaattattgaagaatatgaagatctgtatcagattgttcaagaaacattgcgtcccatcggaaatctttttgaacgcggaatcccagaagatgaagtttcttttttaaccatccactttgcttctttgatcaatgattttgatgaataccaagtcaatcaaaaaattggtgtgattgtttgtccgaatggaatcggtagctctgccatgatctataatgaattaaaaatgatctttccagacattatttttatcggacccattgagaccaaagaactattgcttgagcgccctgaatgtgacctgatctttactacggtacccaatgtcagtctttatacactgaaaaagccagtttatgtggtaaatccaataatgaccaatgaagaaagaaatcaattgattcaagaagtttaccatcagcccagcgaagctatttctctgattggggtggaagaacttatggctgttatcaaaaagcatgcgacaatcgaagatgataaaagtttgaagaaagaattgcaattgctccttaccagaagagaagtcaatccagcttattcagcaaccctaggcgaggaaagaaagcccgttgcgttgattgatatgcttaacccacagtacattttgactaatataaaagtacgctcttgggaagaggcattctatttggcagcaacgccactgatcaaggatcaagtgatctcacgtggttatattgatacgatcatccaaaacgttcgcaaagaaggaccttttttcattatcatggatcaagtagcattgcctcacgcacggccagaagaaggcgcgttaaagctaggcctaggcatcacagtcttacaagaaccagtgataatcaacaaaaaagcgtcgattaaatacatcttcaccctctcagcaattgatcacagcaaacatctatctgccattgccgagctcgtcgctttgttggaacaggaaagttttttcaacttactcgaacaagaagccgatcctcaacaaatctttgactggatcgcatcttttctcttgaaaaataagcatatggttccgatgtaattggactgaataactacaccagagtgatcacccccaaaaaatctaacttattgggttgcttcaataatcagtgttgtttgtgactctttccactacaactgacacacgaagatgtagataagataataccactgaacagtcaaagagcatttaggttacttgatgagagatcatgcaataaatcgatcgtgcttttaatcagacgtatacgcttgaggtaggttatttacatctaataaggacatgggaatcctatccttattgaatgaggcactatttaagttattccgctgaatcatgcagtaaacccgcttataacatccagaaggatcatttttaataattaaattaacatttttcatataaaaagagcaagagcaatcattgcgtattattgattgcacttgctttttttagattcaatccttttttattcataatgaaggtcgatatgaatttgggacagcctttaccgtcaagttatactatcaaaagattagactgaggaggggtgtggtggaaaacaacaatttaagaaaaaaaattagacgatttgtcatgatagcagttttggcgctattgactattggtctcttccaaaaagaagtttttgcagaaaacgtcaatacgttctcaatccaaccactagatgagaatggaaatgtgaatgagaatggctattaccatatcattgacgagccaggaaagcaacgcactgtttcaattcgagtgtataacctttctgaagaagaaatcagcgtgaatgtgaccgtaaatccagcttctacgaatcaaaatggaatccccagttatttaggggaagaagcgtatgatgcttctctcattcatcgaatggatcaactggtcgcaattgaagagagtgaactcctgattcctgcaggttcttcggtactcacaacactgattatctccttaccacaagaagaatgggaaggggatatccttggaggcattcgttttactgaaaaaaagaatcagcagagtgaacaaactgtgactcatgaagtcgcctatacggtaggcattcttttaaatcgagtaggcgggtcagcagttgaaaatgaattgtttttaaatgaggtgaccgcgagtcagcgtaattatcggaatcacattgaagcaaatctacaaaatagagctgctgtgattgttcgcaacatgtctattcagtcaagcatttatagagaaggaagtggaacccctatctatacatatgacgcatacgagttgcgaatggcaccaaattctaatttcaactttggcatccctgctggaaatcagccaattgaagcagggaattatgttctaaagacgcaagtaacagctgatgaaaaagagtatcgctttgaacaatctttttccattacgaatgcgaatgcccggcaattaaatcaaagtgcggtcaatctagagcggacgacatcctacatgtcatatgggatatttgtcggaattggcgtgatcctcgttcttttggtgatgtggtggacttgaaggcggactcggagaaaaaagagaagaaaacgacccatgatataaaaaggactggcttatcggagtcatccagcaaattaaagagcataaaatgcttaatcgtaatgaaatgaatgagcaggatcttgtgaaactatgaaggaacaccctgtaaaatgaacttcaaaaggataacggaggaaagaaaatgaaaaaaacgacacgaacattatcaattgtacttttagcagctagtcttggattggatagcaaaatgggggatgcggcaacttatgatgacgcagcgaatattacgactgaaggaaaagtgaaaatcttggaaaatgactcttcaaacccagtcgttcctgacccggagaatccaggaaatgaggttactcccgaagaaccaaccaatccttatccgggacttttacggatcaactatgtatcaaactttgattttggtcagattcaaaatgtctcgcgtgcgattgaacaaaaagcgcggctcgatcatgtgtgggtaaacggtgaagaagtctcgcgtgtgccttttgtcgcgacagaagatcgccgaggaagtgaacggctaggatgggaattacaagtatcacagccgaatcaattggcagatgcgagtggtcatgaattgattggggcaacgattactttatccgggctgcgttatgtgaatgcaacggctgctacaccaatagtcaatcaaaatgagatcgtcctcggagcagcggcacaaacgctagccacagcagataccgcgcaagggtcaggtgcttgggcattagcattaggacaatcaaatggagaagggcatactgacggtgttgtattgcgtataccagccaataccacagcaaacaatactgaatattctactgcgattgtttgggagctggttgcggatccgactacaggaataggtggataaatcaccctaaattcttctggattaatttgaagggaaaggcgcgatcaaatgaaaagaaatgtccttatcaccatagcaagtttactcgttacagggcacttgcttccctcgacaatcctatttgcggaaaccgttgatgcgtcagagagacaaagggcagaagaccaaagttccactcttgattcagatgaacatcaattttttgaacctgtagatgcagaagatcatgcggctgatgaatcagagggaaacttagatttgcttgattcagggttggatgaagagaacattgatcctgaattaagcgcgattccagaaagaacggaagagtctaaaacgattcaaccaagtgaacatagcggttattctgacgaaactgtgctcacagccgaagcagtccctcaaaagataggactaggtgggaaatttgtcgaggaacgactgaatgagttagtgacaaacgtcaggctgaatggagatgaagtcgcaggtgaggactttaaagtcactcttttgaatcaaccgaacaccactttcctgggaaatctgcaagtcccaatcaccgtcgtacatgtagaaacacaagcagcgactcagataaatgtaccggtggaagtgatatggggccactcgatattttcacgagaagcagcaatcagtgctagcactggagtaatcagtcttcatatcaatgataacggaccatctcttgttgcatcagaaggatttggcaattcttggccgaatcaagttacatcaagaccacgttatacgatttatcgcaacgattacaccaaccaaacgctgcttcctttttttacagtaaaccaatcaagaagcagtgtcgtacaagcttggaacaatgtgttaaacaatagtccgattgactttggtgatgtgatcggattaagcgtaaataggttcgcagtagccaatcagaattacaatggagccaatacatgggtcacgagaaatgaagaacctgttcgagaggcgattggctggccagaggctctgtatatgatgacaccaagcggcttccaattgttgcgagtgaatcaattaacgacgaataaattaacttttgcagctagtagttcaacagaagaaatccttcagagaatgacagaatttttcaatttccatgaagaacttacggaacaggaaaaagaagagctttcgtttgatttgatccgttctgatgcactattaccaggcaaagaaggcaaagcagttgtacaagtgacacaaacaaaagaaaatgggtaccgtttttcaatgacgtacgaggtatcctttacagttggacttggacgactggagttggcgggaattgctcatggcaattttgattttggcgacgtcctaaaaacgagccgtagacaaaatattccagcgcaaggagagtctgctccaacgattatggtcagtgattacagtgatactgcccagtggagcctttatgcgtcgatgagcccttttataaatgaaagaaatcaggagttaagagaagcagccatcgctttgaaggagttgaaagtgatcgaatctgttcatacaggtatttccattcccaaaaatgatatcctgttgggaaccacccctcaaatgattgcggcaagagatagatcaggaacaagagatgaatacggaagaacaatcattcaaattggagaagtaaaagaccagacattaaccggtgtgtcacttcatttgcctgccaatacacctgtggacaagggagagtatcaagcaacaattacttgggaactagtcggggatccgacgataggaggcattcgatgagaaagagagtggtcgtgtttttggtcggtctctgcatttttatccccgtcttttcaaggagcacagtgattggacatgcgacaacaaatgagaatcgtgcggttgtgagcttttaccaagaggaagaacccacccaaccagacctggatgatccaagaacactcccacaaactggaagtaccttttcttatataggaatgctaggcttagtcattgtctttgtgatgtggtaaaaaaacagagaaaaaaaacgtagaaggacaaattgaagatttcacagcgtgtttgtaaaagagggacatctttcgaggcaaagaacagcaaaaaaaattggttataccatcggcaggttcttcatcaataaggaatgacgtgtcgtatagcaaaaaacctgagatagaatgatcatcattctatctcaggtttttttgtatcattttaattgattgatttaattgattgaagaataaataagaatcgaacaatttttaacaagagtaattctttcatttgctaaaaggaccttactggccatttaatgtacttacgattgataggaatatctgtattagccacaaagcagaagctttttaagcgaaagaatatcttttaaaagagggcataagaggttccaccttcgaacttgatttgcttaaaatccatcctaagatgagcgttcactgggctcgaatctacggctcactgattaagagtgtgattgtttagtcgtttcattggggtaatagctgaaaggaagagatttagtagatgcaacctgtttgttaaaagtattcctttttgtaaagctcggaataatttcataataaaacagaggagcgccgattttatttttttaaaaggttgcaacttttcataaaataactaagaaaagaagtggaatgagctccgctatactgtttatagcaatgcgaataaacgaaagaaaggatgaaaaaaatgaagatcagtaaagcagtattaaaggcaattacgttgagtagtgtgctggtattaggtggtacatacgcttctgcggctgagcaaaatcaggcaaacccttctgaagcaacgacaccgttacaaggaaacctaggtttatcagaaaatggtgggtacgatcccaatccgccgagtgatttaaatgaaaaaacaggaatcaaaaatagctattttggtatttcttatgtgcctagaacctttgattttgggatcaccaaattgcaagatagcataaaagagcaaacaatcactacgacgaataaaaatggaaaaacatttaacgttggagtgaaagacaagcgacgggaagatacacaaacatggtcattgaatgtgagacactcgattaatgtcgataatggctatcaaggggtggagctaaaggttcctctggtaggtgacgttaaaagaaatatgaatgatggggatactccttttgaagcagacgatttaactgaacaagtcaaaaaaaataaccaaaatgaagtaaataaatctgaaaatgagcatctaatggtcacatcagaggatcagacgatcatgtatacgaatggcggacaatttgtcaatggagtctatgatttacagttaggcgatgtcggtttacaaattcctgatccaagtagagtgccagatcaaacatttaaaggaaatgtgacttggacattgaccaacacgccaatgaaacaacattatttaacgaaagaaattcgtaatttatttaaagatggcaactgcactaccttaaaaacagatatacgctgtcaagatgttgaagcagcataaaatcttccagagtatgtctcgtaaagggaattgtttagataactcacctatggaaaacttctttggtttattaaagcaagagatttttcacggagaagtctatcggagtttagatgaattgaaaacaaaaattgaccaatatatctattattacaaccataaacgcatcaaaaagaaattaaattggcgaagtccggttcagtttcgagaagctgtaaaaacagctgtctaacagttaatcttatcatacaaaaaaggagtggatttctccactccataaaagtctaactttttggggtcactacactctgcaaatgagaaggggcttttttattttctgtatttattttctaatgctaaagcttttgctgtgaagttggtaaagtaattatctataccaagattgattgccttttttatttcactagtggagtttattgtccaaatattcaaaagttttttgtggccatgaactaatttaacattttcttttgtcatcatactcttttcagcagaaactatatctactatgtcatacgtgactgccttttctaattcgctttgattcttaactaataagagttttggcatatttggaaaacttttgctcaagtcttgcaacggtttaatatcagatgcttgaactacgatattatcttccaagttattttttttacaagatcttcgaaaagcttcgtttgattggagttttcctttagttctattacataattcacagtattcccgtatcgattaaacacatcttgcaaactcaatatcttttcattatcttcagttcttaaatcagaaatttcatcatcggtcatatctacaaaaagtttgtctacaccagttattctttttgctgataaatcatgagaaacataaagagtgttgtctctggatgtcacaagatcttgttcgatatattttgatccgtataaaatagccagatcataagcagcgactgtgtgttcaatctcttctccagaggctcctctatgggagtatacccttgaactggaatcgttagtgttttttattaagtaaaatgttattactgaagaaagaattactaaaaatattaagaatggaattagtatttttgttttttttatctttttacgatgcatacggtacctcaaggtttttcttttattgtaccagaaaaaaaatatataaaggaacagtttttctaactggggatcctaaggcataaataaatgtgcaaataaattaatcatttatcgacgaataccgacaactaggaactaaagatgataaaaatcaacaatatgacgtattcaaattagtcatattgttgatttttaatgttaattgaacagcaacaacaagaatccatggtaaacaaatagcccgctgcggagagcttataaacgaaatattaaacgttattcttttcatttgaattaaaaattattttattgtagactttgtaaggcgatattaaatcgtcaatgaagaggattaggcgggggaaacttggggaagtgtgcctaatcctcttcattttaagtgtacctaattttccaataagaagcattactttttggtaagatgtacatatgacttttatgttttttaaacatatgcaatttaatattaacctttagtattgaattactcaagggccaggtatagaatgtaagtaccaaccaattttttaatttccaaatcttctttataagttcccactctctctcggggagggtgggtcgttttttttgcacaaaaaagcacagcgtatttacacacactgcgcaagtgaaactatgtttctacatcgtaatcattatagcgtatttaacgtcctatttaaagactcaaactcaatcataatcttcgtcttgccaatcaccgaatacttcttaacaacaaattgcttccgatcgttaaactcaccagcaaccacaacctgcattccctcatccacatctgccaagaagtttaaactatgtgctgcaatcaaacaattcgtaccgtcaagagagaaacgcactaaaggggtcctcgacattttcaacactcgtatcttcgaaactacacctctcaatgatttcatgataactacttcttacttctaatttttagtggagattcaattatcatacgatcataaaatttgccattttttataaagcgttcacgttttacagcaatagatttatcgctttgagctaatacagcaagaatggataaatctaagaaaatcttatcatcgtcagaaagggtagagtattcgttagcaagttttgcatcaatttgttctgcaatcatatcttcaaacatttaaaatcactcctcgcaagaattatacgaacctatgttctatttgtaaacaaaaaaaggcgaaactcctcaaaaataagttccgcacagaattgttataaaataaaagaagataaatttatatacccacaaagtatacccacagcataaaaaaagccacatcaaggtttcttttctaaactaccgaagtagccaagaaaccttatgtggcgtgggtttggcacccaatgggccgtgaggggctcgaacccgcgacccgctgattaagagtcagctgctctaccaactgagctaacggcccgtatcaaaattactttattatcttagcactccgacttttaaaaatcaatcgttctgttaaaaaaaaatccgtttttttatctttcgtttcaaaagaagactacccatagagtacatactccgtaatacttatccccttcaaaaatcaaattcttttgttttcctaaattttgagcagaggactacaatccaataccagtatatggtaaaatttatctagttatcaaaaccagataaaaagtttttgataaaccaatattctgctatttaagatggagaagattatggaaaaattacgttcagatttatttgattggagcgagtcgctgaattcctttcatttgccgcggtgggaagagctgccaactttggaactgtacatggatcaagtcattacgttgatcgatcagtacttgtcgccggtaatccagtcggaaaaacattcactgctgacatcatcaatggtcaataattacgtcaaaaaagggatgatcccacccccagagaaaaaacggtataaccaaaaacatttggcatttttgattgccattacgatgttgaagcaagtgttgacaatcccagaaatcaagacgggaatattgtttcaaggaaaagtagtcgggatacgaaatgcgtacaatttattttgtgaagaacaggaaaaagccatttggacagtctgccaagaggcagcagggtcaaaagaagcggtgtctaccgatccgattccagtagaactgatcgcgatcaaaggggcgacccgttcgtttgcaaataaattattggcagaaaaaacgattgaactagaagtaaattacttggaaacgcacaaaggagaatcccatgaataaagagaaaattgccctgcttgtcgactcgggaaccgatgtcccggcagaaatcatgtcacaatatggtatgtatatgttgccattgcagatcatatacaaggatcggacgtatacggataaagtggatattacagcggaagagatctatcaacgattgccgcaagaaattcctagtacgtcattgcccgatggtgaaaccatcaacaagatatttgatcggatcaaagccgatggctatgaacaagttctggcagtcaccatctctagtgggttgagcggtacttataatgttgttcgcttgatgggagaacaacggaatgacttggatatttttgttttagatacgaaaaatatcgggattggtgctggattacaagcgatcagagctgctgagttgctgaatgagggagtcacatggcaagagctcaaagaacagctgctacaagaagttgtccgaaataaggtctttttcaatgtagcgacattggagtacttgcaaaaaggcggccgaattggtttggttgcttcaattctcggaaatgccttgaaattgaatccaatcatttcttgtaatgacgaagggatttattacacagtagcgaaatcacgaggacgtaaaaagagtttggacaagaccgttgaactggtgaaacagtacattggaaatcacaaacaatttcgcctagccgtggcccagggggatgcgttggcagaagctaaagaaatgaaaactcgtcttgaacaagaatttcctcaagtgaaagaaattttctttggacagatttcaccggcattggttgtgcatacagggcctggattattaggcgtcggagtgcagctgttagacgaaacggggatttgatcgagtgactgtgatcgttttctaagagccgctcacaatcattcattaatgaatgttaaaaggtatgaaagttgtcttttcaactttcatacctttttttgtgccgatgagtgaaaagaaacctgtttctctagagatgccgcaatggtcagtgacatgaagggttggcgctcttttgctctcttttgctcctatttactcctaagttattttcgttgaacaaaacaagcagtataatgatttcatagaacaaagcaacagttctccaaggagacggatgcttacagatggagctttatgctatccggattacttaaggcagtatcttgagttgtttatgaaaaaggagtgagtgacaatgaaagaatatgtttttgaatcaaccatttattcttctgagattggtaaaggtggagcatacgtgatttttccttacgatttgcgggctgaatggaataaagggcggctgaaagttcaggcaacatttgatggcgttgactatcaaggaagtatcgtcaatatggagttgaaaaatcaagacggaagtatttgttatattttaggaatcaagaaagagattcgcaaacagatcaaaaaagacattggcgatactgtaaaagttgttgtgaaacctattacggaatgaataagttagcaatcatgagtatgaaaaagaaagaacatcgatacaaaattttcttaagaataagcatagatcaaggctaagatttgaggaaagatgaaaacacatcctaaatcatgtataataagtaggaaagaataaaaaatgaggtgacattttttgaaaaagatcctagtcgtggacgatgaaaaaccgatctcggacatcgtcaaattcaatttgacaaaagaaggctacgaagtatatacagcttatgatggtgaagaagcattagaaaaagtggcagaagttgaaccggatctgattttattagatttgatgctgccgaaaatggatggattagaagtggcacgtgaagttcgaaaaaatcacgatatgccgattattatggttaccgccaaagattctgagatcgacaaagtgttaggactggaattgggtgccgatgattacgtgactaagcccttctccaaccgtgaattagtagctcgtgtcaaagctaatttacgtcgcggttctgcttcggcgaaagaagcagaagaagcaccgaatgcagaattgacgatcggtgatttgacgatccatccagatgcgtacatggtaactaaaaatggcgaagcaatcgaattgacccatcgtgaatttgaactaatgcactatctagcgaaacacttaggtcaagtcatgacacgggaacatttgctgcaaaccgtctggggatatgattattttggtgatgtgcggaccgtcgacgttaccgttcgccgtttacgggaaaaaatcgaagatagcccaagtcatccgaattatttggtcactcgtcgcggagtcggctattacttgcggaaccctgaacaggaataagctatgaaaaataaggttcgcttttttcgatcagtgaacttcaaaatcgccctgacttttatcttgatcttattgatttcgatccagattatcggggcgtattttattcgcgaattagagaaaacaacgatcgatgcctttaagcgcgacatggaggcaagagctagcacgttggtcgttactctaggttcagaacttagtcgaatggacgccgaagacagcctcgattgggatgcaatgaattcttctttgaaccggatcctttccagtaccaactcttctgagattttagagatgcgggtcgtagatgaacaaggaatcattcgggcaaccaccaatatcaatgatcgaggttcagtgggtgaaaaaaacgattaccgagattatgatacgaaccgtagtgaagtgttgtatgacgaatcgacaggacagcgggtctacaacattgtccaatcgatccagtcgcctacaggggatacggttttaggtacattgtacctgcgaagcaatctggaacagaaatacagtgaagtcagtgatactgccgtgatttttgtgacggcttctttaattgctgcagcgatctcaattgttgttgccctacttgtttctcgatccatcactcagccgattggggaaatgcgggaacaagccattcggattgccaaaggggattatagccgcaaagtagcagttcatggccaagacgaactgggacagctggctgaaacattcaatcagctaggagaacgtatcgaagaaacacaagaagcaatggagtcggaacgaaatcgactagatagtgtcctctcccacatgaccgatggcgtcgtagcgactgaccgccgtgggaaagtcattacaatcaatgagatggcgatgtcgttattgaatgttacttctgaagaagcagtcggtcaatcgattctgactctgctccaaatcgatgaagaatacaccttgcgtaaactgctagaaagtcctgatgaaatgctgatcgaacggccgaacaatgacatcgttggaacgaatttgattttacgaatcgacttttcaatgattcgccgtgagtctggatttatttctggtttagtagcggtgatgcatgatgttacagaacaagagaaaaatgaacaagagcggcgagagtttgtatccaatgtgtctcacgaattgcgaacacctttgaccagtatgcgcagctatattgaagcgttgagcgaaggggcttggcaagatccagaaatcgcaccgaacttcttgaaagtgacattagatgaaacggatcggatgattcgaatgatcaatgacctactgagtctttcacgaatggacagcggcaatgcgcaactgcaattggaatacatcaatttcaatgagttagtcagctttgtgttggatcgatttgatatgatggtgacgaatgagaacaaaaaatatgtgattcgtcgtgaattcaccaaacgtgaactttgggtcgaagtcgatacggataagatgattcaagtgatcgacaatattatgaacaatgctatcaaatattcacctgatggcggtgtgatcacagtcaaattgatggaaacccataacaatatcgttttgagtatcaatgatcaaggcctaggcatccctaaaaaggatcttaccaaaatctttgaccgcttttaccgtgttgataaagcccgcgcccggcaacaaggtggtactggtttaggattagccatttcccgcgaagtgatcaaatctcatgggggagccatttgggcagaaagccgagaaaaccgcggttcaacattttatatcatgttgccatatgaaccgtatgaggaggattggtgggaatgaaagtctcagaaaaaatgattcgtttaggtctgatcgttatggttgccctaagcttttacttttcctacatgatttggctgaatcccaccggttacgatcgttcagtcgaacaagctacagatacagtcaatacgagtattcagacctacaaacaaaaaagtgatttatttttgccattgtatttaacctggatccaccaagatgaagtcaaggaaaccaattctgaaacgttgattcgtgacgttcagggactgctctcggatgctcaagtcaatgatctgacggtacaaaattatgattccaagtctttttcagaggcagcaacattggatgagggagtgacgttggcgtattacacgccgttcttactaaatgattacgcggagacctttgatgttgaattggcattaggtgacaacgaagccaacaaaatggctttctcccatattcaaatcgatttgaaagagaataaaatccagtttgtgaatttggaagaatcacggatcattgaaggcaagattgactgggataaaaatgatgtgaatcgcattttgaaagataatccaagagaatggacagcgatgcgccaggaagaatcaggaaaaagcaatcagttctatacacaggacacgatcaagctgaaaaaatacagctatgtttcctctttgcaatcggcgaatctctttcgagaagcattttttacttcgccaaaagatgtcaaagtcaatgatgatagtgtagatacttattattatgaaggtggacagaatatggcggttttgcatgatgatcaagtagtcaaatttgaaaccactgtttcagaaagtgatgaaacggatctgtttatgcaaagtgcggactatattcgtcgtttgggcaacaatttcggaacgatacgcttttttgatcggttgagcaatcaactagattatcgtatttttgtagaagggtatccagtcttcagcagtggtgctcagggattgatgaaagtaactttttctaacagtgggcaattagggaatcgagagatggcaatcgaatctagtttaaatgcgatccaagtgccgattccttctgagaccgaggtggagctgccttcaagcttaaccgttcgcagtgacttgctttctgcaggggcagagacggatcagctgcagcagattattgttggctatcaatggggcgacatcaaaggggcttctgtcgtcgatttgacaccaacttggtatgtaaagtatgagaataactggttcaattatcaggaattaatggctaaattgacagaaacggggggagtttgattggatttcaagcgaatcgaatggatttttttcctagcgtttttggggttgaatgtctttttgttcaacatttacagtgaagcccgcagtgaacagcagaacgttttgcagtcaaatcagacgatcccgattgaacagcgactagcctcagaagacattaaatattcaggagaactttctgacgagtatttgagcgggtactatttaagcggtgaacaaaccgatttggctgctgctttgaaagaagcgcaaggggacaagcggttagtcgaggcgactactgtcaaaggacaacagttgactcatatttcctcgggtggtttctacattagtgatgatactcaggcagaaaagacggtcaatgaatacctgcagcgtaaagaccaggtactttatggagatgaataccattataggaaaaacttgtcgctgttggatcaagaatatccaaccattgttgctagccaatcctatgaaactattcccttcaatgatagctcaagtcggatcgatatgactttagaatcgtcagataaactgttgcagatcgctaagtatactcagacccacatttccaatatcaccccgctgcgggagaaaatgactctctattcagagaaagaagccgtcaacacgctttatttgaataataagttgcctagtcattctaagatattatggacagagctggcttacacaaggattttgattgttggtgatcggaatgtctacattccggcttggttcgttgctgtcaaagcagatgcggatgtaaatattcagatcgaaactgtcaatgcctttagtaatcgaatcattacaaacaatgcagtacaaaaagtagaaaatccatagaaaaataggtataatggaactcgttgaaagtaagagagaggaagacagaaacaatgatgaaggaaagtgcctttcaagtaagcattttagctagcggaagttcaggaaattcgttatatatcgagagcaacaaaaaacgaatcctagtggacgcaggactgagcggcaaaaagatcacttcattattggatgaagttggacgcaagccagaggatctagatgctattttggtcacccatgagcatcgcgaccatatccacggtgtaggggtcttggcgcgcaaatacaagttggatgtctacgcaaacacaaaaacatggcaagcaatggataatatggtaggcaatattgcggttgaacaaaaacatgtttttgaaatgggtaaagttttgacgatgggggatatggacatcgaaagttttggcgtttcccatgatgccgcagcaccacagttctatcggttccataaagatggcaaatcttttgtgatgttgaccgacacaggttattgcagcgatcatgttcgggggatcatcaaaggggccgatgcgtatcttgtcgaaagcaaccatgatttagaaatgctgcggatgggtccttatccttggagtctcaaacagcgcattcttggtgatcgaggacatctatccaatgaagatggggcactagtcatggcagatatattgacggataacacgaagcgagtttatctcgggcatttgagtaaagaaaacaacctaaaagagttagcccacctaactatggtcaatacgatgaaagaacatgacttaggtgtcggtgaggcctttgaggtttatgatacggatcccgataaagcgactgagttattcagtatttgaggatgagtggcgagcgtttttttgaagaaaacaacggtgatggaatgcggacagttttccaccaagccagagaatttatcttaagacaaaaaacgatgttgaaattttcaacatcgtttttttggctctttgtcaataaggactgatgggttgtacaaaatcaaatctgggtcagaatgaacctcattctggctcagattttttgttatcttactttgattaattgattgatcaaaaagattctaattctcatgttctcaaatgatttaaatccgtaggatactcgtttcattgtctttatatgggtattcttcgcttctatttttccattggtgtaaggatagatcatcgcgttggtgatgccttcttcataggtcagaaggttttggagcttttcccgaaagccgtcatctaacgtttcgggaagttctgccaataaggagaaaaataagtcagggtctttgtctcgaaaggcttcaactaattcatgaaaatagggatacgcctccttcagggacgtagaaaagccaagcaatcgatcaatcatcatcgcttccgtaagaaatgggtattttggtgctcgaaaacttttccatgttttgtattcataatggttgatgtttgcacgattttttagcaaaaagcgccagttctttttcagtttttctgcctgacttttctgtcctactttacgaagttcattcatttcacggatacgcaactcattaaaggcttgattcatgtgtttgataatatgaaaccgatcaatcactactttcgcatttggcagaatacgtttggtaagctggaagtaggcggcgttcatgtctgtgactaaaaattttacttcttcaggattagtgcagcctaagaaatagcttgttaatcgaggcaatttacgcgtaggcaagacatcaattaattgtcctgtttcgccatctgcgcaaataaagctcattttatcttctatggaagcgtgcgaacgaaattcatcaaccatcaatactctgggggagaatcctcttagattgctttggtaagtagcttttaaactctttcaacgtacgaataacggtggtcaaagatacctgacaatttttcgcaataaaagataaagatactttttcagtcagtaaagaagcaattttatatctgacatgattcgcgattgaatgtctgggttgaacaaaataactttgagccgtccaatgggttcgacagtttttacaggtatagcgctgcttttttaagcgcataaccaaaggcatgtgattgtattgttcaaagcggacaatcgtttccttcttcccatttttcactacaattactttcccgtttccatctaccacagtagaaccacaatttctacaggtatggggagcaggtgtgaaaacagcatcgacgatcaacgtctttttcttctgaaaggtctcgtaagagacctctgtaatcatcaaatctttctctattaatcgcagcatttttttgatagaatcattcatatagcatatcgtcctctcagttgtttattttgtcgtgatttaatcatactagagaacgatatgttttttaatacctaaaataaaaatggggctgaagaatcaattctgattcatcagtcccataaattatagagccgtttttttttgtgtcatggaaccttgatataaccggcgtgaaccaatagttgaatgataatgactagtgtattcattcccacgtgggtaatcatcgatgtccagatacgtcctgtcaacgcataaagtccagagaaaaagagtcccaatagaatatacaccaacaagtgattgtcactgtgtgcaaaggcaaaggcgacagcactgacaatgacacctatccaaatattcgaatagtttgcaatgattcccacaagggcacggcgaaatacaaattcttccatgataggtccgccaatcatagcggcaagggcaaaaatcgggttttgcagaataatagtgataatattctcagtattctgcgatgcagccacttcgccaaagagcgactcaataaagacagcgaagttttgcaaaagaatggcggcgatgattcctgttaggccataaacaataatagccgatacttttggctgcttgcgttcaaacgacagcggttcattttgtttaaaataaagaaaaatcatcaagattgcgccggcgatatacgaaacggttgtggcagggatcgtagcaccactagatataaaagcgacaggaataaaaaatgcgaccccataaatcaaaatcgtcgataatgcgtacttttttagagacataagtgaaatcatcacactcctttttttctattatagactagtgactcattagaaacaaaatttttccttaggtttttacggtatggagcaataaaaagaaaaagctaaaataaatttaatcaaaaggcttgcaaaaaaaacagaaaatgagtaatattaattttgtgagttagcactctatgtatgagagtgctaacggaaattctatcaaatacaattggagggatttatcgtgttaagaccattaggtgatcgcgtgattatcgaagtcgcaaaagaagaagaaaaaactgtgggaggtatcgtgcttgcttcagcagctaaagaaaaacctcaaacaggaaccgtcattgcagtcggtgaaggacgcacgctagaaaacggtgaaaaagctcctgttgctgtcaacgtgggcgaacaagtcatgttcgaaaaatacgctggcacagaagtgaaatttgaaggtaacgaatatttgatcgttgctgcaaaagacattattgcagtagttgaataaaaaataatttagttgaggtgaatgtaatcatggcaaaagaaatcaaatttgcagaagatgcacgtgcagcaatgttgcgtggggtagataaattagcagatacagtaaaagtaaccttaggccctaaaggtcgtaacgtcgttttagaaaaatcttatggttcaccattgatcacaaatgatggcgtaacgattgcaaaagaaatcgaactagatgatcatttcgaaaatatgggggcaaaacttgtttctgaagttgcttctaaaacaaatgacattgctggtgacggaacaacgacagcaacattgttaacacaagcgatcgttcgcgaaggactaaagaacgtgacagctggtgcgaatccattaggtattcgccgtgggatcgaaatggcaactaaagttgctgttgaagaactacacaacatttcttccatcgttgactcaaaagaagccattgcacaagttggtgctgtgtcttctggtagcgaacaagtcggaaaatacattgcagacgcgatggaaaaagtcggcaatgacggcgtaattaccatcgaagaatccaaagggatcgaaacagaattagatgtagtggaaggcatgcagtttgatcgcggttacctttcacaatacatggtcactgacaatgataaaatggaagctgctttagaaaatccatacatcttgatcacagacaaaaaaatctctaacatccaagacatcttgccattgttagaacaaatcttacaacaatcaaaaccattgttgatcatcgctgatgatgtcgacggtgaagcattaccaacacttgtattgaacaaaatccgcggtacattcaatgtcgtggcagtcaaagcaccaggctttggtgaccgtcgtaaagccatgttggaagacattgcgatcttgactggcggtactgttatcactgaagacttaggtttagaattgaaagatgcaacgatcgacaacctaggacaagcaagtaaagttgttgtggacaaagacaacacaacaatcgttgaaggtgctggcgacaaatcagcaatcgatgctcgtgtgcaattgatcaaaaatcaaattgctgatacaacatctgattttgaccgcgaaaaattacaagaacgcctagcgaaattagcaggcggtgtggcagtcatcaaagtgggtgcgccaactgaaacagaattaaaagaattgaaactacgcatcgaagacgcattgaacgctacgcgtgcagcagttgaagaaggaatggtatctggtgggggaactgcccttgtcaatgtcatcaacaaagtagcagccatcgaagcagacggcgatgcagcaaccggtgtgaaaatcgtcttgcgtgcgttagaagaaccagtacgtcaaatcgctgaaaatgctggctacgaaggatccgtgatcatcgacaaattgaaacacgcagatcttggcgttggtttcaatgcagcaactggcgaatgggtaaacatgcttgaagcaggaatcgttgacccaacgaaagtaacacgctctgcgttgcaaaatgccgcttctgtagccgcattattgttaacaactgaagcagtcgttgctgacaaaccagaacctgctgcaccagcagctccagcaatggatccatccatgggcatgggcggcatgatgtagttatactaaaagaaccccttagcaaggggttcttttctttatgcttctatttctatgatagaaaggagcaaataccaatggtccattgcttgctcattggtatattgaattccttatcattttggcattcaccgctaacatagctcaaaagagatactccatatttttacaccaaataggaattaacttcatgttgaatgattcagtgaagaagtttatgatcaatctatcaaatctatttcattttcattctctttttgagacacccactcttcctacaagagtgggtatttttgcttaaaaagtagtccttttactcaaaatgaacgtgcgccttactagcttgatttttattctaactagcaaggagcagtttcatgtagcacttttttatcaagacagcggatagcgctgcatattttctgtctgtcctaaaatgtaatctactgacacatcataaaaggcagcaagatgcaaaatcgtcataacgtctggtagacgatcaccagcttcgtaatccaaatagtcttccaacgatacatcgatttgctgcgatacctctttttgcgtcaatgcttgcccttctcgcaaaaatttgaatcggcaacgcaatgtatccaataaaaaagcttcttctaatgtcaatttgcgttcctcctcgaatggaaaaatgattgatgacttctctctccatttctattgtaacaacattctagaaataagcgaaatgattcacaacatcagaaataaacaaggagaaaaaaagaaaacaaagtgcttgctctggtacgcgtttcatagattattctattcatgaaaggggcgtatgaagatgcacacttatatggaagtaaagggaaacaatggaatacaacgctgctatgttgcacttgaatttgatgggatcaacttgattctcacgaagcccaagggattttttagagaaaaggtcgcacaaataccgcttgcagaaattgggcacctggtacaggatgaatattttggtgcgcaacgaatcagtttcattcatcaaaatgattattaccaattctatgaatgtggggcaagtgtgatagactatatgaaagaacaattatttgtctaaggagaagcgcatggcgaacattcgggatattgctaagctgaccggttattcggtctcaacgatttcacgagtcatcaataataatccttatgtggatgagcagaagcgtcaggagattttgcgggtaatggaacaagtcaactatatcccgaatcatacggcacgtgtgctaagctcgggaaaaacgaagaacatcggagtgattctcccatttgtcaatcatccgtattttgatatccttctaagcgggattactgcaagtgctttttcccgtgggtataaggtgactttgttgcctacccgctatgaaccagaaatggaagaaaagtacctgcaagaatttgcggcaaaagggtttgatgctctgattatcacatcaagagcaaatcccctcgaaaaactattgccctatcgtgcttatggccgcatcgttttttgtgaaaagatcgactctgtccaagatggatgcacctatatcgatcgtgaacaatccattcgggaagtgtttgcttatttgaaagaaaatggtatcgagcgtattggaattacacttggaagaagtcgtaagctgagcagcaattcgaagatcacagttcgtttgtgtcaggaatatttcccagcttttaccgaagaattgattttttgggattgtttgacggaagaagatgggcgagaggcagccgctttctttgctgataaaaatgtccaagcgatttttaccaatggggatcaggtagctgctggtatcaaattggcttcttcctccgaacgactacttattggcagagacaatttatttattagtgaagttcttcaattgtcaaccatcgactatcatttgcatgaatgtggagaaatggcgttgaagttagcaatccaagaagaacaagggtccatccggattccttatacgtttatcaaacgaagaggacttgagcacacataatgcggctcaagtcctttttatgggtcattaatctgcgtaatgagcgatgactgcctgtaaacagctggctgcgccttggcctgctttttgatcgtaatagtcagtaaaacgtgcatcatgaatgtacatttcacctaaactgcgatgataatcggcagaataaaatggcgctgcaagctgcagccattttttgtgcaactggaaggctgtttttgccaaagaagaagtcacgtcaaatggctcttgtaccacttgtttcaatgtttgaattagttcgttttcggtttgttccaattcttggtaggtttcaaatgacatgttctgccatttttgattgctttgttcaacgacttcttccccataagcggcacggatctcttcgccataggtttcttcattggctgcgagtttttgttgtttaaaataagtgaatttttctttatctgacatagtctgttctccttcataataattgattgtttgggctaatgttgtcaataagcgatcaagcgctgctcgttcctgagacaatcggttgtaatgagcaaccaacagtgtttgaacatcttgttcgggatcatctagcaaatgacggatttcttctagagggaggccaaaggatttaaagtacaaaatctgttgcagacgatccacttgctgtcccccataaatacgatagccggctgaattgatcctttgtggttttaataatccgatttgatcatagtagcgcaatgtacggctgctgacgccagaaattttagccagtgctgttatactatattccaaatttctccctccttatgctctcatcataaaggtttacgtaacgtcaatgtcaacaaaaaattttttgcttcgtcaaattatgttataattatagcaaagaaaggaagattcgatgcaaatagttttttccgatatagacgggacatttcaggaaatgggtcagcctgtccctgaaatcaataaaacagcgatcaactatctgaaagcacaaggcgatcattttgtttttgtgactggtcgagggtatgatctggtagaagcactgatgatagaagaaggaatctcctgtgatgtcatctttggcaatggcgccggcttgaagttggaaggtcaggcgcctgttttagccaattgtttgccgctagctaccttagaagcggtgacagctattttagagaaagaaaatgttttttattttctgcacaccgatcaaggagtgatctgcaaagatcctgcggattatcaagaacaattgaccgcattgaccaataaattagttacagatctcggtgagagaggggcgatgattgctgaatacaagcaagcctattttgtgcatgactgcattcatgcaccggatcttttagcctacattcaggaacggccgacgatcaatgtcctaaagatcgaactgatggaagcatcggatgaaaagatcgaacagttgcgtctattgctgcagactgaaccagtcagtgcgtttcagtcatttgttcagacattggaagtcgttgatcccttagcaacaaaaggagccgcgatcacgaattttatgcaggctttccctcatgcaaagagttttgggatcggggatggtgagaatgacttagccatgtttgaagtggtagatgtctctgttgcagtagccaatgcgagtgaatcgatccgtaacgtttgcgatcgtatgattcctagtgcagctgacggcggagtcggccaatttatcatggatgaactaatacgagaggatgttgtatatgaaattgattgaaacaccagtcaaccaaaatttgaatttggagacattttatccggtcatctcaaaatttatttttgataaagtcgcgattaaatactacaaactttattctcttgatcgaacccagatcatgtatgtggatacttttgacaagatcacattggttttgatcaacaataaaaagaagatcagccgcggagaagtggatacagcgattcatcgcttactaaaagttgaccgcaaggatgtcactgtagatgtcaatatccgtaaaaagatggaagcagcgggagtcaagtttgcgaaacctcgcaaagatatcatcctagttcaattagcagttgattaaccattagcagcctgtgttataagttgaagcaagacccaatgattcgagtgaaactggtggaataccccatcgcatcatgaagtttttcggtctttttctaacttatggcacagactttttttgaggaaaaaaacaagaaatactttctttttttatttttttgctataatagggagaagtaagtatgagggagcaaaacgatgcaaaaattatttaaagatgatagtttcactttgcatactgatctctatcagatcaatatgatgcaaacctattgggaattaggacgtgcggatttgaatgcagtcttcgagtgctatttccgtgacatgccctttgagaatggctatgctatctttgcagggttagaacgcttagtcgattatttgaacaatttgaccttttcagattcagatatcgattatttaagagaaatcggcggatatccggaggctttcttggattatctgaaagaattcaaatttgcctgcacggttcgttcagctttagaaggcgatctcgtcttcaacaatgagccgatcattcaagttgaaggacctttggcacaagctcaattgatcgaaacagccttattgaacatggttaatttccaaacattgattgcaacaaaagctgctcggatcaagtctgtgatcggagatgatcccttattagaatttgggtctcgtcgtgcgcaagaactggacgcagcgatttggggaactcgtgcggcttatatcggaggtgcgggtgccacaagtaatgttcgagcaggcaagatctttggcatccctgcaagcgggacgcatgctcattctcttgtgcaatcctatggcaatgattatgatgcctttatggcgtatgccaagacgcacaaagactgtgtctttttagtcgatacgtatgatacattgcgcttaggtgtaccaaatgcgattcgtgtcgcaaaagaactaggggatcaaatcaactttttaggagtacggatcgatagtggagacatggcttatatctccaaaaaagtccgagaacaactagatgaagctggctttacagaagctaagatctacgcatcaaatgatttggatgaaagcacgattctaagtctaaaaatgcaaaaagccaaaatcgatgtttggggtgtcggtacaaagttgatcaccgcctatgatcaaccggcattgggagccgtttataaactggtttcgatcgaaaacgaacaaggcgaaatgatcgatacgatcaaattatccggtaatgctgaaaaagtttctacaccaggcaagaaacaagtctggcgtatcacacgtaaaaaagacggcaagtctgaaggggattatgtgactctttgggacgaaaacccccaggaagaaaaagagttgttcatgttccatccggttcacacctttatcaataaaacagtgacagattttgatgctcgacctttgctgcaagacatttttgtagaaggacagcaagtctatcaattgccggatcttgaacacatcaaagcctatgctacaaattgtttggattcattatgggatgagtacaaacgagatttgaatccgcaaaaatacccagtcgatctctctcaagagtgctggaatcacaagatgcggaccattgaaaaagtgcgtacgcaaaccaaaacagaaattatttaattggtcctagaaagctaggaccaatcttcaaaaaaattaggaggcgtttctatgacattgcaacaagaaatcattcgcgagttaggcgtagttccaacaattgatgcgaaagcagagattcgtaatagcattgaatttttaaaagcatatcttcaaaaaaatccctttttgaaaactcttgttttagggatcagcggtggacaagattcaacactggctggtcgattggctcagttgacaatggaagaaatgcgcagtgagacgaatgatcccaattatcagttcattgcgatccgcttaccttatggagaacaggctgacgaagaagatgccaaaaaagccatcgaatttatcaaaccggacattacattacgagtgaatatcaaagcagccgtcgatgcgcaagtggcagccgtcgaagaagctggcttacctgtttctgattttaataaaggcaacatcaaggcacgtcagcggatgattactcaatatgccgttgcaggcgaaaaagctggcgctgttttaggaacagatcacgcggccgaaaacatcaccggtttctttacaaaatttggtgatggcggagctgacctcttgccgctatttcgtttgaataaacgtcaaggacgtcaattgttgcaagaattaggagcgccggaagcactgtacaaaaaggttcctactgctgatttggaagatggcaaaccaatgatcgctgacgaagtagcacttggtgtgacttatgatgagatcgatgattacttggaaggaaagaccgtttcaccaaatgcgcaacaaacgattgaaaattggtggcacaaaacacagcataaacggcatctgccaatatcaatctttgacgacttctggaaataaatcttttttactctgtgatagtttttggtccatcgcatctaggagaaaataaatatccgaacgatttatgaatgaattttttccgagaggcctcgctgtatcgctcaacgaggtcttctggatttcatagattgttcgggattttttgttttttttttatcttagtcataactctcttcaaggaagaatggcaagaataaaaaaacaaaacaagcaaacggctctttacattctaaatcgcaaagcataaaatacaggttatggttagaaaaggaggaatgtccttcgtgaaaagaaagattcatcccaagttgcagatggggctaaaactaatcggtagttttattttgattctctttagcaacctttatctacaatggtgtcaaaacaacctttctgttgagctagcattaaaatttgctttttcttggcacacagaaaagtttttcttagcttgtctggtgctgctgcttttctatgggttattgacaagtctggctggatcccttggagtcggggcgctgttttatagcattgtgatcgggatcttgggttatgcaaattacctcaagatggcttatcggcaagaaccaatctatccagatgatttgaaaatgatcactcagtttgatttgctgcatacgatgatcggaacaggccccttcgtcttggcgatgctatgtgtgatactcgcagtgggagcaattatctggagtatttatcgcagccgtaaattgtcaaaaaagaaacagatcctcagagggctgacaatgctcgtttgtacaattggtttggtttatgtttcgcattttaatgacagcaataatttgcttagaaaagcgtataaccggaccgcattatggatcccttattcacaaaaaatgaattactacaataccggttttattggtgggtttctattcaatctgcgggtcgatgcaatggaacaaccagcgggttattctgaagctgcgataaaagaaattgccaaaaaatataccgctgaagctggcgaaacaaacaaaacgcgtgaccaagaagcgccaaatatcgtttatgtcatgagcgaaagcttttctgatccgagccatctaaaaggactgacgattacaggggatcctttgaaggattattatgcggtagccgatcaaacgatcagtgggaaaatgttgtcgcaaaattatggtggcgggactgcaaacattgaatttgaagcattgaccagtttttcaatggggttgttgaatccgcaaatgaccacgccttacacgatgctggtccctaaattgacacaattgccttcagtggtctcattcttgcaaaaacaaggatatgatgcgacagcgatccacccctatgatacatcgatgtacaagcggaaagatgtctatgatgtgatgggttttcaaacctttttggatcaagacacgatgacttacacggacaagatcgagaacaatccttatatctcggatgcttctgcttataaagaagttctgtctcttttgtcagatgagaaaaagccgcaattcgttcacttggtgacgatgcagacccatatgccttatgaaggaaagtatcagacattaaattatcaagccacaggcgatggaaatataactgctcttgaaaactatctgcaagatatctcttacagtagtaccgcactaaaagactttattgaacaattgaagcagctgaatcgaagaacagtagtcgttttctggggggatcacctgccaggcatctactcggatgcgattaaagatcaaaatgatactgctgcgctgcatgaaacggaattcttgatggtggattctgatggaaccttttcaactgacactgttccggtaacgagtcccttttactttgcacctaacgtgttgaatgaaagtcagcaaccaatcaatggattttatgcgttgctgctagcactgcaagaaaaattgccggcttttgaacatgggcagtattaccaaggcgaacagtggcgaagtgagctaagcttagatgcgaaatcacggcagctatatgaagactatcagctgattcaatatgacattttacaaggaaaacaatatagtttacagacagatttatttggctaagaaaaattgtctaacataaaaaggctgtgacaaaagaaggatcaaggaagaaacacattgctcttattcagagtaggctggtttcttcgctaaatgtctttcttttgtcatagcctttatttattgagcaatcctagcgatgtgttttaagcagcatgtctctactaaggatcacagatttcttgtaggtcattatagatcttgccaagtccgttgctgattgaagtaagctgcttcattttcagcctgttcaacgattgatttcggataaccaagcactcgcagtagggcaatcgcattacggcttgttgaaggaccttgtttgaccttatagtcaaaagagataccgtcatcggctgtgacttgttcagaaaaatggatattgctgcagtcatttttcaatatttcagtcagttcaatatcatgagtcgcaataaaagccaaacttgtataacggctcaaccaatgaatgatactagcagaagcagcgatccgctcaatcgtattggttcccttcagtatctcatcgacaaagcaatagcagcgttctttttgctgaacttgttccaacaatcgtttgatcgacttgatttctgcaacaaaatagctatcgccctcaaacaaatcgtcttcgaccgccattgaggtcaacacatgaccaggttccatcgtaaaggattcagcaacagctgtttggatagtttgcgccaatagacaattgatagcgatgcttttgacataggtcgatttgccagaagcgtttgacccggttaccagtgtattggtttgccagtcgacatcattcatgacagcttcagtcagaaggggatgataggtcccttttgcgctgaccgttccttttttgaattcagggatacaagtgatcggcatataggtacggaaattaaggatcgcgcaagcaatttccaacttgcctaacaattcccataatgcgatcgcttgttgattgtatcgagccaataaggtaacgacgtaatggtacgagataaaaggcagcataaagatgatattgatgtattcaaaaagcatatcgccttcactgccattttttgaacgaaaagaaacgccgaatcgggggatttttttcagaggcagcagttcttttttgatttgctcttgtaatggtgtggcaagtttggcaatcttgttgccgcaggccactgtctgaactagatagcgcatactgttgagttctgtttctagtgtggcttttttgatcgaatagtaaaccgtattaaagaggacgcttatcaaaatcactgcaattcctggcaaaaagccaaaagctatcaaaatcagcccaacaatcggcaaacagcccaataaaataaagacaggcaagttgccaatactttctttcttccctgatgccagatagtttttggaaaagttattatccagtttcccaagttgggcaaaggtatattgggtatcttcgcgaatttttggattggctgcgaaaaaatcaattaacgcggtcagctgtcgatccggcttaaattgaaagttgcgcaactgctgatagagagcttcagaacctacactggagtaagtactgttgatcatttcaaaaacctcgaataagtctaagtcataccaagtaatgtcatcgatctcactatcatggggataaaaatctttctctaccatccaggcctttttgaggctttcttctttgtcaaagcgaggctgacgggggaattttccccattcttgtttgacgcgacgtcttaattttattcggttccaagtatctaagccaataataagtgcactaacgaacaagataatcaagataaccatatattttgcgtccatgtttttctccgtttctaggagcaaaagcaggatctagctcctgctccttctaagttaattgattttacgcaagacatcataaatgcgtgcgatgtcctgcgttgttcctcgcagttcaaaatcagctagaaatggaatctggaactgttcagcatattgtttggcagtcaggcagtattgataattgaaatttttgttgccgctgccgatcacaccgcgacaatagcgggcattatccgcataatcaatatactcccgcatggtttctgtcaaaatttcctgatccccattatctacgccgttgccgccttcaagataggtcggcacaaacacgacaaaaggttcgctttcttcttcgaaaatggaattgtcatcaatttctttgacggaccattctagaggatgcgctgttggctgctgggcggcatagtccattagtcgtttgacaaatgcccgggtatttcctgagattgaaatataaagtagtttcatgtcatcaccttccgtatccagtataacagaatcaaaataaaatagagcaggtcttttgtagccaaaggaaggaaaaataggtaaactaagtagatagaaaaggagtgagcatatgttttctgagatgcatcatgtggccattattgccagtgattaccaacgagcaaaatcattttatgtcgacaaattaggatttaaggtgatccgtgagcaccatcgtcccgaaaaaaacgataccaaaatcgatttggcttttggctcatctgagattgagttgtttatcgtggatcaaccacctaaacgagcaagttatccggaagcaaccggcttacgacacttggcttttcgagtaacaaacattgagaaaatggtagcagaacttgaaacaaaaggaattacgtgtgagccgattcgctttgacagctttacgaataaaaaaatgacattcttccaagacccagatgggttgccactggaactacacgaatagtatcgaggattcattcgaagcgcaacgacacttttttacttcggatgacaaaaaaatgctgttattctgaagaaaacacaaggaggagaaatcgtgattcgatttgcacaaaaagaagatcgttttgctatggcgaaacttgttttagtcattttaaaagatatggaattaccgtttgtggcagaaataggagaagaaaaaacgctcgagatcttggctgaagcgatgttagagcctgattatcgttatggttataccagaggattggtcaatgaaatcgatggacaagtggctggggttgcttttggttacccagataaagatgaacctaccattgatgaaccgttaacgaagattctggagtcctacggtttggataaagaaatgaaactgttcgttgatcaagaaacgttgcagaacgaatggtacttagataccatttgtgtcgatgaaaaattccgtggaaaaggggttggctcagctttattggctgcactgccaaaaattgcccaacgagatggctataccacaattggtttaagtgtcgataaagccaatacacacgccaaacgtctctatgaacgtcacggttttcaagtggttgctgaacgaaagatcagtggtcatctatatgatcatatgcaaaaagaaaccagttgagtatctcaactggtttcgttcgttaatcgtaactccaaatgttgctgggtcttgcgtttgcgattatagagccaataatccataatcgcagcaatacaaatgcaaactggcgcatcctcatcgttgaccacatcgatcacataataatcgccagtcaatagtgttgctttatccatttccatgatcttcttgttgaaatgatggatcgcataccgatgattgtagatatccccgtggacagcccaatggagctgttggatataataaaaatccccaggccagttgaaaattttttgtaacgtacctactttttcaaagtccttgtagatctcaaatcgtgtgccaaaggtaaaactgatttgcttaatactggcgaccagtgtgccgtccaaacgatagagggaaagtgcatcgcctttagttccccagcgcccgaccatcaagaataacgatttgcccttttcgtctttaacgatcgttcgcgtgatactgctgagttgtctgtcttgaataaaaaattccgacatatctacgcctcctcttgtatcccgaaaagctgcgtcaattataaattctcatcgattgcccgaataattgctttgccgactcctgattcaatgttagtatccgtcagatacttcgcatattctttgacttcgatttccccgttacccatagcaaagctgacaccagcaagctgtatcatgctgacatcattcaagttgtcaccaatcgtcatgacatccgacagttgaatcgctcgctctttagcaacgtgtgccaccgcgatccctttttgggcattgcgatgattgatttcaatattgttttgtccggaagaagtaaccactaagtcgccataaccatcgatttcttgtgtgatcggtcctaaaacacgcgcgccatcttgatggaagcaaatgatttttaagatttccagatcttcaatcgcaaacagttcattgaagtctttgacataattgatgggaagaaaagctagtcgtgcagcagtcatggcaatggccattttgtgggtcagatggggcattgcttctgctgtatggatcgcaaaattctcgattcggcgcgtctggctttctgaataaatgccattgctcgtggaaatctcaaaataaatgtctttttctcttaataagtccatcaatgaacgggttttttctttagaaataggaacggtgaataaagaagttcctgatttgtcaaacacttgtgcaccattaagtgtgatcatagcacaatcaataccggcttcttgcaaaggcggcagagcttctttccggttgcgcccagtggccaccatgaattcgactccttgggattgggcatatttgatcgcttggatattttcttctgaaatctgcatgttggcgtttagtaaagtaccatccatatcagaagcgattaattttatcattgtcagcgtcctttcttatggtttctatagaatagtgtaccacaaatcagcaattatttttgagaatgtcttcttgtttcttaggcagatcttttgttatccttaactaaaagcaaaggagcgagacgatgagaaagattttagaaaatgattggcaagaagttttgcaagcttccttcgatcaaacctattaccaacagttacgggaatttttgaaagtagaatatgcaacacagaagatccacccggcaatggaccatatttatgaagcactgaaactgactccgtatcatgaagtgaaagtagtgatcttaggacaagatccatatcatggtccgcatcaagcccatgggttatctttttcagtccaacccggagtacggattccgccttctttacgcaatatctataaggaattgcaaagtgatctaggcatcgcgccagtctctcacggttatttggttccttgggcgcaacaaggaattttactactaaatacggtgttgacagttcgtgaaggacaggcttattcgcatcgaggcaaaggatgggaacgattgacagatactatcatcgaaaagctgaatcaacgggataaaccagtgatctttgtattatggggaaaaccagcccagcaaaagaaagcgttgatcgatacgaaaaagcatatcatcatagaatctccccatccaagtccgttatctgccagtcgtggtttctttggatcgaaaccattttcaaaaatcaatcaagcattgatcgcattggatgaaacaccaattgactggcaattaccagaaaaaatagtacaggtgtgaaactgtagtagtgcagaagagacggactgtgaattgtgtaacaaaaattatctttttcgattagtacagcatttttatctgttcttttttttgcaactattgtacaatgtaagggtataaaaaaactggaggtctttacccgtggaactattcgaaagtttaaaatttaaaatcgtgcgtcgtcatatcaaaatcgttttcccagaagcaacagatcctcgtatccttggtgcagcaagccgtctacgttcagaagaattggtagaaccagttttgattggtaaccctgctgagattgagaaagcagcggaagctcgaggaatcaacatcgctaattttgagatcctagatcctgaaaactatgaccggtgggatgaaatggtcgaagcttttgttgagcgccgaaacggcaaagcaacaaaagagcaagccgaagaaatcttaaaagatgttaattattttggtacgatgttaacttacatggggatcactgaaggaatggtttcaggtgcgatccattcaacgggcgatacggttagacctgcattgcagatcattaaaacaaaaccaggcgtgagccgcacaagtggtgcctttttgatggttcgtggtcgtgatcaagaaaaatacctattttctgactgtgccatcaatgtgaacccttctgcccaagaattagcagagatcgctgttgattcagcaaaaacagcggaattatttgatatcgatccaaaagttgccatgcttagcttctcgacaaaaggttcagctaaagcaccagaagtcgataaagtggttgaagcaacaaaaattgcccaagaattggcgcctgagtacgaaatcgatggtgaattgcaattcgatgctgcttacatttcagctgtcgctcaattaaaagcaccagaatcagaagtagctggtaaagcaacggtctttgtcttcccagatttacaatctggaaacattggctacaaaatcgcacaacgcttcggtaacttcgaagcaattggaccaatcctgcaaggattgaacaaaccaatctcagacctttctcgcggatcaaacgaagaagacgtctacaaactatccatcattacagcagcacaaacattgatggataaataagataactaatcaaacaaccaagccgttccttttgtcaaggaacggctttttgctgcgaatcacaacgattggcttgcatagcaagacagagttgatgatgagcagtactaggcgaccaaagggagcgtagtaaccttcagcctgaatcacaacgattggcttgcatagcaagacagagttgatgatgagcagtactaggcgactaaagggagcgtagtaaccttcagcctgaatcactgcgattggcttgcatagcaagacagagttgatgatgagcagtactaggcgactaaagaaagcgtagtaaccttcagcctgaatcactgcgattggcttgcgaagcagagagcagatgatgagcagcggggaccaaagaaagcgtagtaaccttcagcctgaatcactgcgattggcttgcgaagcagagagcagatgatgagcagcggggatcaaagaaagcgtagtaaccttcagcctgaatcactgcgattggcttgcgaagcagagagcagatgatgagcagcggggaccaaagaaagcgtagtaacctcagtatgaatcacaacgattgcccttagagtggcatggaagtctagttagcgcaacaagcttagaaacaattgcaggcaaagcaagatgaggggcgtcgcttccaaaaatactgcccacagcaggataaaaatggcttttctttcaaactccttgcgacggtacgctctttacttttgattctaaaacaagctatactaactactaacagcaagtgaaaagataaaggacggatcaaacatgataacgatcgctgatttagatgcaacagaaaaatttgccgaagtgattggcagagtggccctgcctggagacaatttggtgttaactggggaactgggagccggtaaaacgacgttgaccaaagggatcgctcgaggtctggggatcagtcaactgatcaaaagcccaacctatacgattattcgtgaatatactgaaggtcggttgccactctatcatatggatatttaccgggtagaatttggcgcatcagacttgggattagatgattattttgaaggtgatggtctttctgtgatcgagtggggaaatcttctggaagagtctttaccggaagattatttggaactgattttggaaaaagataatacagaagagcaaaaacgttttgtgaaattgcttacatttggtccgaaagctgaggctttccaacagcgtattttggcgcaatgggaggcagataatgagtgacattcatttgacattgcgtgaggctcggggcgaagatgcggcagaactcttggcagtcagtcaaaagattggtcaagaaactgactttttggtcatggatgaaacaggcctcgccctgcctgaagcaatgttggcacagcaactagaaagcttgtatgaacaagacaatcacctcctattgttagcccttgatggagaacgaattattggtatggcttctatcaaaggttattcggaatggcgcatggcccatgtaggagaaataggtctatcgattttaaaagactattggggaatgggactagggtcacttcttttagaagaattgcttgaatgggtcagtgaagtagggttgttgacacgcttggagttgacggtccaagcgcgcaatgaacgagctatccatttatatcagaagtacggatttgaaattgaaggttgtatgaaacaagccgcccaaacaaaagatgggcaacgaattgatgttctaatgatggcaaaattagttgatgaggagtgagaaggatgatcctgcttgttgaaccggccctagcagacaaagaacagttaacagcttatcgcgcatcatttttagaagacaatgaaactatccacggaggttctgggctagaaacagcggagacaatcgaaaaatggcttgaactgcaagaagcctacaaatcaccggcaactgttcctgctagtcatgtcattagtcgggtttatcttgcaaaacaagcagatacagtcatcggaatcttgaatctgcggctagagctcaacgactatttgctgcagcaaggcggtcatatcggttattctgtgaaaaaaacgtatcgccaaaaaggatatgggacagcaatgcttgctcaatccttgtcgattgccaaaagcttcggaatagaaaaagtactggtgacatgcgatgctcacaatcaagcatctgctaaggtcattgaaaaaaatggtggtcaattagaagatatatggatcgatccggtaaatgggaatagtactcgtcgttattggctttcaacaaataactgaaagacaaaagagtaagaaagtaagaagaaaagtaaaaaactgatactcattttacgagtaccagtttttttaatgggtcgatcccgaaatcgttttcttgacgtaataagatctgagcacaggcacgactatcttcaagggcgtcgtggtgattcagcaaaggaatctgcagctgttggcagacagtattcagcttgtgattctcgaattcaggatagagtttgcggcttgtacgtactgtacagagtgaaagataatttggctgttctatcccatagtaatcaagacatccagctaaaacgccagtatcgaaaccagcattgtgggcaacgatcagactgttgagattataatattgctggatttgtttccaaatgtcaggaaatttaggagcattgacgacgtcttccggatgaatgccatggatttggatatttttccaaaagaaatctgtctccggctggatcaacgtgtagtattctccaacaattttactgtcccgaaccatgactaatgccaatgaacaagcactgtgcttttgataattggctgtttcaaagtccattgcgataaaattcattgccttcacctcaaagctattctagcacaaatctttgaaatgaaaagatacaagatttttttggcaggatggccgataggacacagcgaaagaatatggtaagcaattagtttaactgcaattcgacggggcaatgatcactgcctaagatttctgtatggatttttgcatcaaccaggcggtcatttaaatcgtctgaaacaacgaagtaatcgatgcgccatccagcattatttttgcgcgcattaaaccggtaactccaccaagaataaatcccttcagcatcgggataaaagtagcggaaagtatccgtaaagcctgctgaaagtaaggttgaaaatttttcccgttcttcaggagtgaagccggcgtttttttggttggttttccagtttttaagatcaatgttttgatgagcgacgttcaagtcaccgcataggataactggtttttgctgtttcagatcggtcagataggcacgaaaagcatcttcccatgtcatgcgataatcgagacgacgcaattcattttgggcgtttggtgtatagcaagtgactaaaaagaattcggggtattccagggtgatcacccggccttcggcatcatgttcctcgatgccaatcccataatgggcagcaagtgccggttctttagcaaagatcgctgtaccagagtatcctttcttttctgcataattccagtattgcgtgtatcctggcagatccaactcgatctgccctgcttgcagcttcgtttcttgcaaacaaaagaagtctgcatcgaaggtctcaaaggcttctaaaaagttctttttgacgattgctcgtaagccattcacgttccaagaaataaatttcatatttgtcctcctcggttcaactatattttccattctaccgaaaaaaagtgtaagattaaagcaagacgtaacgtttaggaggaatcagtcatgaagatcggtgttatcgggttaggaaatattgcacaaaaagcatacttgccaagttatattgcattgcaggatcaagcggatttttattttgccacccggcgtgaatccgttcagaaagaattgcagcaacgttatcggttggcgcatatgtacaccaatttagacgagctgatcgatcagggaatcgaggcttgtttcattcatacagctactggcagccactatgagttgatcaaaaaatgtctgacagaaggaatccatgtctttgtcgataaaccggtcagcgagaattttgctgaagtagaagaattgtttgctctagctaaagcaaaacaaaagttgttgatggtcggcttcaatcgccgctttgccccgatggtcgatcaattaaaacaaattccggataagcggatgatttatctgtcaaaacaccggcaagctgctagtcatgataccaagtatgtgatctatgatctcttcttacatttggtggatactggtgtctatttattggatgaaccgatcatcgcgcatactagtcagatcaaagaatcagcggatggattggagacggccacactgatcttggaaacagcacatacaacggcgattttgacgatggatctcaagagtggtgccaatacggaagattaccggatcaccgccaaaagcggaacctatgatgtgaggaatttgactgctcttacggagtatgtggaggggaaaacggtggaacatgagtttggcgattgggaaacaacgttgaacaaacgagggttctatccattagtttcggcatttattgcagcagtcgccgatccaacagctatcgatctgcgccaagcgcaagtgatagacagtcaccagctttgccaagaaatgatcgctgccaatcatcgggcaaaaagtgattctttagagaagtagcaacttttcaatgaacatgctaaaataaggaagatgtttaatgtgaaaggactctttcttgtgaataaagaattaatgatcaagcaatttccagaaattgcgttactaaaagatgaagctttattgaattatacgtatacgaaaacaggagggcctgcagatatcctggcttttcccaaatcagcaaaagaagtagaacaaattgtcgcctattgtcgagaaactgatactccttggttggtcttaggcaatgctagcaacttgatcgttcgtgatggtgggattcgcggtgttgtgatcatgctatcagaaatgaatcagataacggtagaagataccactttgatcgtcgaagcaggcgcgaagctgatcgatacaacgtatgtggcactccatgaatcgttgacaggatttgagtttgcttgcgggattccaggaagcgtcgggggagcggtatttatgaatgccggtgcttatgatggtgagattcaagatatttttgcgtcctgtgatgtcttgctcgcagatggacgcgtcgtgactatgatgaaagaagagatggcgttttcttatcgccacagtacgcttcaagaccaacatgcgatcattctgtcggctcgttttgatttggcgcaaggggatcaagatcaaatcaagaaacgaatggatgagttgacggaactccgtcagctgaaacaaccattagaatatccttcttgcggcagtgtcttcaagcggcctgttggtcatttcactggcaagttgattcaagacgccggtttacaaggattgaaatggggcggcgcgcaaatttctgaaaagcatgctggcttcatcgtcaatgtcgatcatgctacagcgacggactatgtggaactgatcgctcatatccaacaagtgatcaaggagcgatttgatgtccagttagagacagaagtgcgtattatcggagaagaagcaaaataattaaacatgttcgtaattgtgacaacgtctgatgacaaatcgatatctgaagaatgaatgtattgcaaggcttcgtaaggcatcgttgcgatgtatcgagaacctatagcattacttgaatctttcagaacggttgtttatttggacagttgtcacattttttattaaaaaaggcaatgggaaggctgtactatttgtctacccattccgtcttggctacaataaagaaaaggggaaaatggagggatagtatgaaaaagtggttgggtattggcttgttggttgggctattctttttaaccggttgtacgaaattaccgcaggatcagtttgctgatgggttaacagtacaaaaagatatgaatgctggtgactttagcgtgacgatcgatacatttgaatttgctggcgaggacagccaaaattcacaagcaagcatgatcgcagggatgattttctcccagttggcgggaaccaagatcacaggaaattttgttgaagatccaaaaagcaaaaatattcgtttggatgcctcactgtcttctggagaaatcgatgttccactgaatcttttgatcgatggcaagagccatgacacctacctttcagcagaaatcgttgaggcaatgagcaatctgtttgcatttgatacattcggtacatcggatacgtttgcatcggatacatttgatagtagcgaaacgccagatacgacggggaaagataaatatattcgtctgtcaccagatgagatgtcagatcttgacacggaccagctattgaacaatagcttattttcttctgagacattggcagagtatgtcaaaacgttggatcgtgaatcttttaaaagagatggtgacaccatcacgcatacattcacaaaacaagagctgttggactttgttgactatgccaaaaaacaaaaggcagacactagtgagattacgcagtgggaagatctgctgaaagacagtgagcgtattgatttgactgtatctgtcaatgcaaagaaacaaaaccaaaaagttgtgatgaacatgacccaatctggcgagctgcctttggctattgggatcacgtttactatcagcggcaaacaaagtgatgaaaaagtccagttacctgcttcagaaaatgtcgttgatcagcaagagttttttgattcctaccaagaagactctttttgggatgacagttattacggcgatgatcccctctctgatgaagattggacaaattatacgctaacagacgaggagtttgaccaattattagagatggttgccactgatctacagggcatgacggatgaagaaatcgttgattttttgttgatttatgaagacttactgaccgaagaacagtaccagcgtttggctgaggcattgcaagtaagccaaaatttatgagcagcataaaggaacactaaaaaaagagccattgaagcaagcttatcaagctgcttcaatggctctttttatttgaagttctttcaaatgaatcaaaaacgtggctttttcgtcaatctcagtaatacagaagcaacagccatggtcgcaattcctgcaacgatcgcctctgggataccttgtgtcaaaataacgccaaggatggcggtatagacggcagttccggcattaccgatcgcagcggcatattcttgttggaataaaaagtagatgaggttcatcacgagaatcgtattcgtcaatcctccagcgattccagcaatcagcaacgaagtgctttgccgcttgttttgccacattttctggcaggctttaaagacaaaataagggacgattccgatcagaatgcgaggaatcagagcaaccaagatcgctttccaacttccatgatccatgccatagactgggacaaatggcgagaacacaaaagaaagcggcgagatgatccacgttgaacggaccatactaatgatgccaaaagcccctcccagaaagccgccgatccgtggtcctaaaatgatggaagcaatgatcacgggaatgtgcatcgtagtagcattgatcggacctaaaggaatgaaccctagaaaaggaacggatgctaaaagaatcaagatccccaggaaaaatgcagttaaaactaaatcaaaagtggctatttttttcatgttagactcctcgtacttccaatgctgcaacagcttgttcaacgatcgcttccacggtcgccagcgcgccgcggccgaaatccccgcaagccaacaaggcttcgcgaggagcgatctcttgataaccgacctctttcaaaatggctagatttcgttgcacgattggattttgatacatattggtattcatcgctggtgcaatcagttttggtacctccgcagtcaatgccaaagcgaccgttgagatcagatcatctgctaaaccatgagccaatttaccaatcaagttggcactggctggcgcgatcaagaaaaggtccgcttgcttcgctaattcgatatggttgatccggtcaggttggcgttcttgcatcacatccacatggattggtcgcttagataatgactggagagtcaatggtgtgatgaattgcgtactattagcagtcatcatcacgtcgactgcataccctcgttttgtcaactcattcgcgatatccgctgctttataagcggagatacttccgctaatacctaataatacatgtttttgtttcattttaattcctccttatccaaggggctcttcatttttcaataatgtatctacgatcaatgcggcaatttctggcttagtatggccggtaccgatttttttatcggcagttagtaagtgaccaatatgctgatcttctttgatcgtagtcaagtcattggccaagacataatctgcttgatttttagctagactatcacgggctacttgaaaaagtgtttcttccgaaacatcgactaataatttgaaacccaccaactttgtctgaggttgttttgctttgattcgctggatcactttaggtgttttctttaagaccatcactagatgatcagtattcgaagagagtttgcctgactgttccattgactgtgctactaatgtctctaacaactcaggagatacttggttgtcaaattgtggaagcagctgattgatcgctgtcaagaatgcttcttgtgaccaactgttagcaggtgtgaaatcactgaccgccatgctgtggatcactgcaaagtaagtatgtgccgataataaggactcaagacaattcagtaatccaagagtgccttcgatagagtggaccgtcaatcgtgaatcgttagctggctgttttgcttgacgagttgtgacataatcaatttcaatccctttttctaataacgcttcagcgatggctttgcctaatgaacctgttgaatgattcgtgatcgaccgtactgaatcaattttttcggaagttccgccggcagtgatcaatattctcatgcttctgatgccaccttgacgatcgtccgaccttgatgggtaccggctaataaggatgcgagtgtttccggcaatgtttcaaaggtaatctcatgactatgcagctgatctgcgacataccagcctgttgctagacgttgccaaagttcgttacgagtggcagtgtcaacattgaccgagtcaataccgatcacgcggatgccgcgaagaataaagggtaaaaccgtcgtttcgatgttgatccccccagcatttccgcataaaaaggcaccgccgccgtaacggatttgcggcaataatgcggaaagaagggaaccaccgacggtatcaataactgccgctactgtctgcttcgccagcggtttgattttttctggttgccaatcagctggatcagtgattttggttgctcctaatgccaataaccagtctgcctcttttttacgagaaagtgcgacgatgtttgtatagcctaacttatgcaacaatgcgatgctgatacttccgacacctccggaagctccggtaatgacgatcggcgcttctttttcaagggcaagtttttcaagttcggtgacagccagtgccgcagtaaagccagcagtaccataacacatactatctttagccgataaagtttctggtcgtttgatcagccaatcagccggtacccgttggtattggctgaagccaccgggatgagaaacacctaggccgtaacctgtcagcagtacttggtcgccggttgaaaaatccggactttgactttcaatgacttcaccagccaagtcgatgcctggtgtcatcggataagtacggataacaccgccattttctttagctgctaaagcatctttataattgacatcggaataagcgactttgacaagaacgtctccctcaggtaaatctgtcagtttgcaggtctttaaagtggcagtaaatgttggttcatttgttacgatataagacgaaaattctgtcattcaaggcaactcctttaatggtttgaactcatgataccataatctggttgatttttaatcattgttgcgaaacagatgattattcatgagacaatttcttcgttagaatgagagaagagcattgagagctactgaatgaaaacggctaaataaaggcattatgtgacagctgctcattggctgcagctcatttagtcaataagaaagcttcgaaaaattctcttcaaaaaaggtaaaaaaagacttgttttttttagaaaagtttgtatactggaaaaagtgaaattaaacttgaagtttactattagcaaacttttttgtgggaattttttactatatttttgatcgagggggaatgtagatggagattggcgagaagctccgcaatttgcgggtccaaaaaaatctgacacaagaagaattaggggaacgaaccgatttatccaaagggtacatctcccaattagaaagggatttaagttcaccttcaatggaaactttttttacgattttagaagtccttggagtgaccccggaagaatttttccgtcaagaaaatgcagaccatcaagtggtctatcgagaagaagacagtacgagttattatgatgaagaaaatggctatgaactgcggtggctgattccagactcgaatgaaaaagagatggagccagtcgtgttgacttttgagaaagccggcgagtataagacatttgaaccttctttagcggaaacatttatttatgttttggaaggaacgattgcactgagcctcggggaatcagaatacaaagcacgtaagggacagtccatttattaccaagcaacagaaccgcatcaattgagaaatatcggccggcaaaaaagtcgcgccttgatcgttgtaactgattcttatttatgatttagggggaaaaagtgtgggaaaaacaattatttcgttcaataacgtggtcaagcgatttgatgacgatgaaaccgtcttgaaaaatgttagttttgatattgaagaagggcgtttttatacgcttttaggtccttcaggatgtgggaaaaccacgatcttacggatcattgccggattttccgaagcaacagaaggcgatgtttactttgatggccagcgtatcaacgatgttccggcaaatcagcgacaagttaatactgtctttcaggactatgcgttgtttccacatatgaacgtgttcgagaatgtggcttttggcttacggatcaagaagctgccgaaagacgaagtcacaaagaaagtcaaagaagcattgcgattggtccaacttccaggttacgaaaatcgtgagatcagtgaaatgtccggtggacagcgtcaacgggtggcgattgcgcgagcgatcgtcaatgagccgaaagttttactcttagatgagcctttgtcagctttagacttgaaattacgaacagacatgcagtacgaattgcgggaactgcagcagcgattaggaattacctttatctttgtgacccacgatcaagaagaagcattagcgatgagtgatgagatcttcgtcatgaataaaggaaagatcattcaaagtgggacaccggtagacatttatgacgagccgatcaatcattttgtggcggactttgtcggcgaaagtaatatcgtgaatggcacgatgatcgatgataatttagtcgagtttgtcggcaaacgcttcgagtgcgtggatggcggtatgcgggcgaatgaacccgttgaaatcgtgatccgcccagaagatctaagtttgaccaccgctgagaaagggaaattgatcgttgaggtagacacgcaattgttccgcggcgtacattatgaaatcatttgttacgatgaacaaggcaatgaatggatggtccattcgactagaaaagccaaagaaggcagcaagatcggtttgttttttgagcctgaagacattcatgtcatgcgtttcaatgaatcagaagaagattttgatgctcgtttagagagctacgaagattaggagggagcacatgacgaaaatgcgtcgtttctatgcaataccctatgtcttttggttattgctatttgttatcgcaccagtattattgatcgtctatcagtcctttttcgatatggatgggaatttttcactggtcaattatcaaagttatttaggttccggcaagtatttgatcatgacattgaactccgtgtggtatgcctttttgatcacattgatcacgctggtcatcagttatcctacggcttactttttgacaaaactacgtcataaagacttatggttactgctgattattttacctacatgggtcaatttgctgttaaaagcctatgcctttattggtatttttggtattcatggcagcgtcaatcattttttggaaatcatgggtgtcggaccaaaacagattttgttcaccgattttagctttttaacggtagcggtctatattgagctgccttttatgatcatgccgattttcaatgcactagaggagatgaatccttcattgattagtgcgagccgtgacttaggagcgaacagctatgagacttttcgccgggtcattctgcctttgtcattgaacggtgtcaaaagcggcgtacaagcagttttcattccttctctttcactcttcatgctgacacgtttgattggaggaaaccgtgtaatcacgttaggaactgcgattgagcagcatttccttgtgacacaaaactggggcatgggttcgacgatcggtgtgattttgattattgctatgttcttagtgatgctcctgacaggtgagaagaaaaaaggaggacaacgaaaatgaaaaaattccgctggtcaaatctttatcttgtcgttgtctttatcctattgtacgtcccaattttttatttgattttttattccttcaatgatggcggtacaatgaatgactttactgggtttacctttgaacattaccagtccgtctttcaagatacacgtctgatgatcattgtattgaatacctttatgctggcatttttatccgcccttttagcaacagtgatcggcacgttcggtgcgatggggatctactatacgaaaaaacggcgaacacgaacagcgttgttaagtttgaacaatgtcttactggtttctccagatgtcatcattggtgccagttttctgattttcttcacgatgatcggaaatttgttccgcggctttagcctaggtttttttagtgtgttactgtctcatgtggcctttagtattcccatcgttgttttgatggttttaccaaagctacaagaaatgaatgattccatgattgatgccgctcgtgacttaggtgccaataatctgcaagtcatcaagaacattattttgccgtttctgacaccgggagtcattgccggctatttcatggctttcacttattcactggatgattttgctgtgacgttctttgtaacagggaatggctttagcacactttctgtagaaatctattctcgtgcccgtcaggggatcagcctagaaatcaatgccttgagcacattggtctttttattctcaatgattctagtcgtagggtactactttatcagcaaagaaaatgtgtcgaaaaaactacgtaaaaatcggcgagcggaggtggcaaatctgcgatgaaaagattacaatctttgatcataggaattgtcgccatcattttggtactgctgtttggtgtacgggagttggaacattcttcaggaatggcgggcgccaaagttttgaatatctataactggggtgattatatcgatccagatcttttgaagaagtttgagaacgagaccggttataaggtcaattatgaaaccttcgattccaatgaagcgatgtttacgaaaattcagcaaggaggaacgtcctatgacattgccatcccaagtgaatatatgatccaaaaaatgatggaagagcacttgctgaaacctcttgatcacagcaagatcaaagggctagacaatattgatccccgctttttggatttaagttttgatcctgacaaccgctattcgatcccatatttttgggggactcttggtatcgtctataatgataaattttttgctgaaggtgaaatcaaggaatgggatgatctgtggaaaccagaactaaaagacagtatcatgctgatcgatggcgcgcgggaagtcatcggtctagggttaaacagtttggggtattcattgaacagcaaagacgacaaacagcttacagcagccttcaacaaattgcgcaaaatgacgccaaacatcaaagcaatcgtagcagacgaaatcaaaatgtatatggcaaacgaagaagcctctgtcgctgtcactttctcgggagaagcagccgatatgatgtatgagaatgaacatatccattatgtgatcccatccgaaggatccaatctttggtttgataatatggttattcccaaaacgtcaaaaaatgaagaaggggcctatgcatttttgaactttatgcttgaaccagaaaatgctgcccaaaatgctgagtatatcggttattccacaccaaacaaaaaagcactcgcgttattgccagatgaaatcacgcaagacaaacagttctatccttcagatgagctgatgaagcatttggaagtctatgaaaatctaggcgcccaatatttaggcatttataatgacctatttttggagttgaagatgtacaggagataatggtaaaactcagtaagaatggggatttatcaacgttctaaagagctaaaaatcgtcctttttctatctgagttttccaattttctaccaaaagcggctgaaaagccgctttttttgtgttattttattttttctaccacgtttttctaccagagatactttgctagaaaagctttgcgatagagatttttaccagacgatgttgaaaataaaaagacagaaacgcttgaccgtatatagacgttcatctatattgtatatagataattatctatatacaattcaataggaggtcctccatggaaaactatgaacagattgctaccatcatgagagccttagctgatccaaaaaggctgaaaattgttgacttactttctacagctgactctctttgtgcatgtgaagtgttggagcattttgactttactcaaccgacattatcacaccacatgaagcttttagagaaggcaggaattgtcaaagtaacgaaaaaaagtcaatggcatcattacgctttacaggaagattttgttgaggatttcctagtaattttgaaggaacttcttatcaaagaaaaatcaattagctagtaaacgataggagtcttatgaatgaacaatgtatctacggaagtaactgaaaaacctgcaataaattttttcgagaagtatctaacagtttgggtattgttatgtatggcagcaggcatgctaatcggaaagtttttacctagtgtcgcagaccgattagaaagctatcaagtattaaatacaaatattccaattgccgttttaacttgggttatgattttcccaatgatgatgaaaatcgattttaaatcaatactgaacgtccgaaaaacatatcaggggattatgatctctagcattacaagctggctaattaagccgttcttgatgtttggcttagcctctttcttcttttatgttgtttttagcaattttatcccagcagacttagcaaaagactatgtggctggagcggttttgttaggggcagcgccatgtaccgctatggtatttgtttggtcaaaccttacaaaaggtgatccagcacataccttggttcaagtatcaattaacgatttattaatcattgtcctatttgtaccaattgtttctttccttttaggagtaaataatgtgtttgtaccatggaatattctctttgcttctgtactactatttgtgctagtaccgttagttggtggggcattgacgagatacttcatgataaaacgtaagggaattgattactttaacaatcgcttcttaccaaagtttgactccattacaacgattggcttgttattgacattggtaatcatttttacttatcagggggatattattttaaacaatccgtttcacgttctcatgattgccgtgcctttagtcttacaaaatattattaccgcaaactttgcttattttacttgtaaatggacaaaacagcctcataatgtggcagctccagcagctttgattggtgcttcagacttttttgagttatcggttgccgtagcaattacgcttttcggtgtcaattcaccagttgtgctagtgacaacagttggtgttctgacagaagtgcctgttatgttgttattagtaaaattgatcaatggaacgaaagattggttcccgacaaaaggagaaaatgaatgaaaaaaatctatttcttatgtacgggcaattcctgtcgaagccaaatagcggaaggatttgctaaaaaatacttagatgattcttgggagattcgaagtgctggcgttgaaactcacggcttgaatcctagagcggtggctgtaatggaagaatctggaatcgatatttcgaatcaaacatctgacttgattgatttggactactttaatcagtccgatatgattattactctttgcggtgacgcagcagataagtgtcccatgatttcaaaggaaagcacacaccttcattgggatttagtagaccctgccaaagcgaaaggatctgaggcagaaattagaagtgcctttcgaaacacaagagatgaaatcaaaaagagaatgattgaattatcgcagcagttaaatgtgtaattcaaaaagggagcggggtaaggtatgtggacttggattagcgaccaattactaaaaatggtttggctaaatgatttgatggggaaattaattgagcgttttgggctttcgctagacatgttgcatttctaattgagcagaatattcaaccgctatctattcaagaacgattgggccatgcgaatattcaaattactttaggaacttacggtcacttatatgcaaagtcagatcaacaagtagttaacgcgattgataatgttcaagagggcgctattctttcgaaaaatgacgatttattgccagtctgagttttccactacgctaccagaagacagacaaatgctttcgtaccagtgtttttggttgagttgctcctgttgaagatgtatcgaaagtaagcatgcagctgattgactgatacaagggaaggaagcaagtttcaaaaatatctttccccattatgttttaaaatagttacagcttcctagcgacctgtagagagacagcaaaagtctttgtctacaggtttttttgtcttagaaaagagtcgctgagacaattggaagcagctgccctgcagaagaaatactaagcagtactaggtcgaaacaagaaatagtcccaaacaaagcgctatcctataaaaactaaaaatacaatgcgtcagttacagtaactttttttgaaaagggtcatgggtttatagccgtagtttttagaatgaatcagctaattcgaagataataatatggaatttttctagaaattatcgcatgaaatgacccttgattgagaacgccatgaaaggtgggagaaatgcagttgtgtatataagcgaaagctgtctcttctttccaaagaagactggatgattttggaatctgattttctttggcttaaagggtaaaatagtttgtttttttgggagattaaatttatactaatttttatagctaatttagtgacttgttaagtagatacgaaacaactcctgaattagaaaacaaatgaatgggaaagcgaatgtttgatgacagctatcattcgctttgctgaaccgtttgcctaaggagtggaatgttgtgccagatttagtaaagtttgtattggttatcttagttatttgggttatttatcaattggttacttctgttttatttagcttgtcgcaaaaagccgttaaaaaacgactgaagagtaataagatgacagatcaacaacttgtaaacttgtatcattctgttgcaaagtcaaatcaatataatacgatgcaagccatattttcttatggaattttttacaaaagtcatgaaaaacaaagtaatgaagtgtacaagttgtatcgagatgaaatggaaaaaagaaacttgctataaaagaaattttaaggtcacttatttttctgataagtaacatcaaacatagatatggctaaaaatagatccttctttgcaattttgtgaggagggctctatttttttgagcaaacaaaataaataggtgaataaaaagggactctttttttgatggaacatcgtctctgcgtttctactggtaatagtagtgtaacagtagaatttttaaagagtctagctagatatgcaatgctgcttatcaaagacaggatttcataaaaatctatgaatctagtttgtttaggggtattataaatatagcaacaaagtggataaacaatctggaggaggaagcatgattcaacaatttttgcaaaaatttacacgaaaaactgggaaagtagaacaatcattcgaagtagtatctaaagaacacagagaaataaaagggctttcttttgaacaaaacgaagatgaatcgatcgttatggactttttgaatcatatggacagagagtatgacacaacacctgcaggacggaaacagcaaggggatgcctttgagcaatttttggcagcggtctttcggctagcaaactacgatgttgagatcaccagaaaaagctatctgcaaggcaaacaggtctacactggtgatgacaatgtagacttgattttaagcaaagatgcggaacggattgctgttcaagccaaacattaccgcttgaacacgaaagcacccaacttgatcacgaaagagtttgtcaataaatattcaggaatctcagataaaaattggacaaataaactttttatcacaacatctttatttaatccccatgtttatttagagatcgagaagaatgaaaaagcacaaaacattgaatggtatgacaggtacgggttattgcagttgttgaacacattgatcccagaaacaatggaaaagcacatgtttttaaatagtttgccagaacaagtagtcaaatgtccggaatgtgaatcagggtttattgtccaaaaatggaataagcaaaaacatagctatttcaaaggatgtacgatgtttccagagtgtgcccatacggaaagtgtttcattcaggcacacacgtaaaagttttactacgtcctcaaaagaactagataatagcatttcttcttaggataactggtactctaaaaagctcatttgttgaacgaatcagacacttagtagaagaaaggaatgaaaagatgtttaatctcgctgttcgtggccacgacttaaccaaggtttgtgatccacaagatctcgcttgtcaaatcgctgaaaaaggcatcaaaaatgttcaatttgcactaaatgcttcatttccggaacttagtgctgctgcccagatcaatccgggaatggggactttttttaaaaatgaatttgggcaacagaatgttcaagtggcattgttgagctgctatagtaatttgattcatccagatcctcatgaacgagaaaagattctgcagaaatttgaacgctatctttttcatgcacgctattttggggcgtcaatggttgcttcggaaacgggttccgttattcccacacttggttacagtgaagaaaatttcacagatgaagtttttgatgagcttgtaactgttgtccagcggttggtaaaaaccggggaacgttatcaaacaatggttgggatcgaagcgggattaaatcaccccctattttccaatgaccgaattcaggaattgatcgcaagagttccttctgattttctgggcatcgtctatgaccctaccaatctcatcactccagaaacggcaagtaaacaagtagaaatcgttgcagaggcctttgagaagtttggtgaacgaattgtctgtctccacttgaaagactacgtgattgaagaggaccgcattgtttctgtccctttaggagaaggaatcattccttatcaagccattttacaaatcgttgaccaatacaaaccttattgctatgtcgtattggagggaacaaaagacgaagaaatcaaacgggcggttgctatgatagaggggctaagctgaatcgaatgaacccattggcaaaaaaatcatttgacgtcaaagaagtgattgcctctaatcgcgaacacatttagagagcacgcttatttaaaagaagcgacagcataagttagaatgggacaaacagacactagcgcataatcctgccaatattctgaattaacgctcaaaatatgcgatgaggatgtttgtgttctgtcccgttaaacgttaatctgtcgcttctttttttgttgggaatgatacgttctaattgaggctgttttattcgttgatctgccaatgacgaatcctatggatcagctgttctttctctttttcactggcaaaggaatggcgggcggcggtctcattcaataagcgcagctcactttccgacatttggcagtgacgggtcatgtgtatgtattcatcagtcaatgttgttttagaaacggtgcggttatctgtgtttaagcaaaaagggaccccagctgtcagccattccctgaaaggatattggtgataatccgtgatggctttggtatgcacattactagtaggacaaccttcaatacagatttgattgcgggagacaaaatcttgggctttcttatcccctttcaaaatgataccgtggccaatgcgttttgcaccactttcgattgcttgatagacattacggatacagccgcattcaccggcatgcaatgtcaattgcacgttttgaccgtctatgaaaagttggtaagtttgcgctaatttgggaacatagtcatcttcttcaggaccagctaaatcgatgcccacaactttctcttcagaaacagactccgaaaaaatctgggagattgcagcagcagactcttgccgcatcccgatgatcaagatattcccttttaccggatagatggactccgcacgagcgatccctctagctactgcttgaatcgtttgtgggcaggaaagaccctgttccattgactgactaggagcaaagcggatttcgatatacgcgacaccatcttcaaacgcttgttccatgacatcaaacgctgcggcttctaatgcaaattcactttggagataaggaagaacgaaatcaaagcgttccaagtactcattaagatcagaacagtcttggggggcttgcatccgttcttcaaggatcgacagttcttgtgggataggcagattttgctgattggcgatcttaagtaatgtttctggacgaatcgatccatccaaatggcagtgcaattctactttagggaaggcttggatttggcttttcgttaacacgtcattcctcctcgcatacgcagggtacgctgaatttttttatgtatgaatatagcatagatacgggttatgtgctagtgaaaaaaggaaattctcatgataaacactctccctctcaaaaaagcttctataaaaagcctctataaaaagcctctataaaaagcctctataaaaagcctctataaaaagcctctataaaaagcctctataaaaaagctccggtcaaaaaagctcgtatcaaaaaagccgctgccatgggaggattgtcccatggcagcgtacgattttgttgagttggcactttttttgctgagaaaactaaatcagctctgagagttcgacggcatcgatcgccagatcttgtgcggcttccttcaacgtgaagtgaccgtcaaatgcgatgacaccacgcgccagtgcagcgtttgttcttaatgccttttcaggatcggcagccaattgtttagcgtagggtaatgtggcgatactcaatgccaatgtagcagtctgtggaactgcgccaggcatattggcaacagcataatggatcacattttcttggatgtaggtaggatcgtcatgagtagtgacacgatcttctgtctcaaaaatgcctccttgatcaatcgcaatatctacaatcactgatttttctgccatggttttcaccatctcacgagttactagatttggcgcttttttgcctggcagcaagacggcgccaatcaccaagtctgcttgttgaatagcggcttcaatgttgaaacgattagagaagagtgtctgaacttgtccgtcaaatagctggtctaattcttgtaagcgtgggatggatacatcgagaatcgtgacttgcgtcccaagccctaacgccattttcgcggcattggttccggcaacgccaccaccaataatcgtgacctgaccttttcgaacacccgggacaccggacaggaggactcctttgccgccatagattttttctaagaattgtgcgccgatctgaactgccattcgaccagcaatttcactcattggagagaggagaggcagcgtcccattagccagttggacattctcatagccaatcgctcgaaccttggagaacatgagcgcttttgctaattctggattggcagcaacatgtaggtaagtaaataacagcaatcccgctcttaagtaggaatactcttctggcagcggatctttgactttcatcaccatgtcagccgcccagacgtctgcagcgttagcaacgatcgttgcgccgactgctcgataggcttcgtctgaaaaagttgatccgatacctgcatttgcttcaaccaagacctcgtgcccttcttgaaccaattcatagacgccagctggcggcaaagctacacgattttcattgttcttgatttctttaggaattccgattttcatatgcgtcacacctttctttcttctattataaaggaaagcggatccattgtaaggagaaagcgaagatttctcaaggtagccgtcaagaggcgcggtcattatcaacatgcattgatgaggactatttataaaaaaactacctatagagtgtcaagaaagaggtaatcgtgcttgatccttcctgacaacttataggtagtttcttttttataaattagtactttcgtcctctgtaaatgtccaaaaatgtaaactttgagcagcgatttcttccaatgaataggacgttaaataatgttttttttccggcgtatcgtttggatctaaaacaaccacattttcgtcttgcatagcagccaacaccatgatatgaccagtatctgtgaaatctccactggtcacagagacgatcactggctgtccaactgccagataattggctacttgcgctgtgtctgtgcccaaatcgtgatacgagtaaccaaaggaatccgcaaaatcagagaaaatccgccaatcggttccttgcccatcgacatagtagctatcttgtgcccaatccaaaacttcaagcggcgaaacattatcctctcgcaaataagcgagtaccattgaaagagagagcagggcacagccattatcgcttaaagtttgcgtaccatctgaaccataggaataatcagcccattcttcatttgtttgtaggtaaagaggcgtagtcactccattttcttgtaaatactcgttcgcttgttcattgtaagctgcttgatcaaaatccatgtcatccatcatgggatattcttcataatcttggctggaatagctcacatgagaaagtcggataaatgcagcaaaaatcaataataaacccaacaaaacaagaaaaacataacgctttctttgtttcccttttttcttcatagcttccctcctgaagtagcgtgccttttttgccttacttcaagtaaagcagagggaatgaaggttgtcatccgcctgtggactgattcgtgtcggttgtttctagttcttccaattccagactcgtgttttcccaagcttccatcagctgttcttgggtggcttggacagtctccattgcttgattcagcgaagacaaacggacgtggtcgttcaatgcgtcaggacgagtcatcgcttgttcgatttcttcaagctctgcttcggttttggctaggtctgcttcaatttgagtgactttacgctgcaatgagcgaatggctttttgttgttctttgctctggaagaaagattgtttgccttgtgagatggctttctcttgaacatcagattgctgcatcgcagctagttctgtttcttccagttttttctccacgtaataatcatagtcccctaaatacaatttgctgccggtttcagataattcaatgactttggtcgcgattcgattgataaagtagcggtcatgagaaacaaaaagcaatgtgccttcataatcaatcaaggcattttcgagtacttctttgctgtcgatgtccaagtggttagtcggttcatctaagatcaggaagttgtcatgatccatcgcaagttttgctaaagcgacccgtgccttttcgccgccactgagcaatgtgattggtttttcaacatcttcaccagaaaaaaggaaacttcctaaaattgtgcggatctctacttctggcgtagtggggtgctcatcccataattctttcaagattgtttttgttgaatggagatctgattgggtttgatcataatacccaattgagacattggcacctagatgaacgtcaccgcgaatcaaaggaatcttgtggatcagtgattttaataatgtcgatttgccaattccattagggccgactaatgcaatggcatctttccggcgaacatccaaatcgatcagctcggatagaacagtctcttgataaccgatggctgcgttggctacttgcattaccacattgccagaaggtttactgattgaaaaaaggaaatttgcggatttttcatctccttgaggccgatcgagccgctccattttttctaattgtttgcgccggctttgcgcccgtttagttgtggaggcacgaactaaattacgcgctacaaagtcttctaatttattgatttcttcttgttgtttttcgaaagctttccattcactttgcagctgctcggctttcaaaaccagataacgactgtaattccctttgtaatggtgcattttccgtcggctaagctcatagacctcattgacgactttatctaagaaataacggtcatgagatacaatcaaaagagcaccggcatacccttgaagatagttttcaagccaagacaatgtctcaatatccaggtggttagtcggttcatccaaaatcaaaatatctggcttttgcaacagcatctttgctagtgctagacgagttttttgaccaccagacaatgtttcaatggattgctcataaaaagtgccgtcgaacttaaagccgtgtagaacagaacggatctcattttcatatccgtagccgtttttttcggcaaattcatgttgtagctggtcatattcttttaatagaccatcataattgactgctgtcgggtctgtttctgaaatggcgacttctaatgagcgcatccgctgttccatctgtcgaatgccggcaaaagccgtcaacatttcttcccagactgtagcagtactgtttaaaccagtgtcttgggcaagataacctagtgtcgcagttttatttttggcgatcgttcctttatcggggctttcgatcccggcaatgatttttaacagggtcgattttccggcgccatttcttcccacaagcgcgatccgggaatggctagcaatctctaggttgatattctcaaataaaacttcagcgccaaatagtctggcgatttgatttgcttgtaatagtatcatatgtattcattcctattcttgaagtcacttgtctccttggttgcaatactatcagtctatcacattttgtgataaacagcgattatgaaaaaagaatgattgtatcattaaacaaaaaaaatttcaaattgtgagcaatcaaattgatttttgagcaaactatttgatatgatagctacatcacacgtgaatttttcacaatgggggagtatttcttgaaagatcatcaaattccaaaggcaacagcgaaacgtttgcctttgtattaccgctatttacgcatcttgcacaatgctggaaagttgaaggtttcatctactgaattaagcgaagctgtccaagtggatagcgcaacgattcgtcgcgacttctcttattttggggaattgggaaaacgcggctatggctatgacgtggaaagcctgatgcagttttttgctaaaacgttgaatgaagaccatatgacaaatgtcgcgctagtaggtgttggtaatctaggtagcgcactgttaaaatataaattccatcagagcaatagcattcggatcagtgctgcatttgatgtgaatgaagatatcgtaggacgaatcgtggatggcgttcctgtctatccaatgagcgatatgaaagaacaagtgaagatccaacagatcgatgtcgcgatcttgacggttcccgcacaacattcgcaagacttagtcaatgagcttgtgaaagcagggatcaaaggaatcttgaactttacgcctgcgcgcatcactgcaccaaaaggtgtgctgatccaaaatgttgatttgaccaatgaattacaaacactgatttatttcttgcattctggcaacgtcttaacgacagatcaaccggaaaaccacgaaacgactgaatcagaataaaacccaaaaacactgtctttccatcaaccttcgcgtctagtaggtgatggaaagacagtgtttttttattccatcagttgatcaaaaagatcgtcataagagatggtctcggttttggtcaaggcagtcctatagcgatcaataatagcagccagcctattaaaatcaatgattcgtgcttctctgtggcgttcatctccttgaaaataaagaaggacgacaggagcagtcaatgctgaaaattggccagccgcctctgggacttccgctacattgacagcataaagtggaacatgcttttctaaagctaatttattaagacgaggtttgtctgctaagcagacactgcaagccggctgtgagagataaataagtgccaatggggtttcttttatcttcgtcagcagttcatctaatgtattcatttgtatcatgcaaattcctccaagcagattctctgtctaatgtacgttttgagggacaacttgtcaaagaaactgctggaaaagaataaaaactaaagcaagctttaaggtgccagcaaagactgtaaaaaacattgtgcattgaggcaaaaaaacgtatagtagttccagcgcaattatttttttataaagaaggttgaatatatgttacaaagcttacctaattctgttttgcagatgagcgtgatctttctctccatcgtcattgaagccttgccttttgtcttattaggctgcttgatttcaggggcgctgcaagtttttctgacgccagaacgagtgacaaaaatcctgccaaagaataaattggcctccattgcaatggggtgtggtttaggcgttttcttcccgtcttgtgaatgtggaatcgttccgatcgtcaatcaattcgtcaaaaaagacgtaccagtctacacggcttttgcttttatgctgacagcccctattgtgaatcccattgtaattttttcgacattcatcgcatttggcaattcagcgaagtttgcctttttgcgagtacttggcagcttgttggtggcaatggcggtaggtgtttggctggcttatttcagtaagcgagagattttgaaaacccaattgatcacagcttcagaggatacccatcaaggacattaccatgggcatgctcatgatacaggttctgagaaacgaaaatggtcccatcaaatacggcatttgttgcaacacagtattgatgaattcttcgatactggtcggtatttgatcattggcggattgattgcagcagcgatgcagacgtatttgccaacgggaatgatgttgactttgggttctacgaaattcttggcggtattggtcatgcttgttttggcattgacgatgtcgctgtgctctgaagcagatgcgtttatcggttcttcgctgcttagtctgttcggcgccggtccagtcgtgggttttctggtctttggtcctatggtggacatcaagaatcttctgatgatgaaacgatattttaccggtcgttttattgcaacaatggtgggattaattgctgttgtagtctcaatttatgcatgggtggtgtaaacaatgatccgttttttgattttatctggatattttgagttgatgatgtacttgcaggtatcaggaaaactgaatcagttcatcaatgtccactatcgttatctagcgattctttcgatgattgtcgctttatttttggcattagtccagttgtatttttgggtcaaacaaacgcctgatgaacatgaagatgagcatcaccatggactcgaaaaaaaatctcagcgcctcattgcgtatttcttattagcattgccaatcattgttggtttgtttttcccaacagtcagtctggatacgaccattgttgaagcaaaagggtttaatttcccgctgagtgaagagtctgtcggcgatcccgaaatgaatacccaataccttaaaccagatactagtctttattacaataaagatgattatgacgagcaaatgacgacttcgttagcgaagtatgccgataaacaaacgattgctgtcaccgacgagaattatttggaactcatggaattgatctatacgtatccaagtgaatttatcgggaaaaaaatcagctatgacggttttgtttatcatgcagcgcaagatgatcgtaatgaaatctttctgtttcgttttgggatcattcactgtgtagcggattcaggtgtttttggattacgtgttgagttacctgaacaaacggttaccgagaatgaccaatggctgcacattgaaggaaccatccagtcgcaatactatcaaccctttaaacgagatttgccaatggtagtcgttgaccaagaacaaaccatcgaggcaccggctaaccaatatgtttatcgatcattctagcgaaatgagagaaatgtcggtttttttgaaaaagttcacaaaaatatcataaagctttgttataataaagataaactagtgcagatgtttgtagttttacaaaacgtcgagtacaatagaaacgtacaatgtgctaaaaaacaatataaagagaggtgtcgtgaaatgggttttacagatgaaacagtacggtttgattttgatgatagccgcaagaaagaaatcagtgaaacactggctatcgtgtatcgtgcattagaagaaaaaggttataatccaatcaatcaaatcgtcggttatctcctttctggcgacccggcttacattcctcgttatcgggatgcccggaacttgattcgtcgtcatgaacgcgatgagattttggaagttttgattcgttattacttaggaaatcacgggatcaacctataatgagagtcatgggtttagatgtcggttcacgaacagttggtgtagctgttagtgatcctatgggatggactgcgcaagggatcgagatcattcgaatcaacgaagatgaaaatgactttggctatgatcgtcttggagaattagtcaaagagtatgaagtgactcgttttgtggtgggactgcccaagaatatgaataacaccattggtccaagagcagaggcttcactagcttacggcaaggccatcgaagaacgttttgatttgcctgttgactaccaagacgaacgcttgacgactgttcaagcagaacgaatgctagttgaacaagccaacacatctcgtgccaaacgtaagaaagtcattgacaaattagcagcagtaatgattttgcagaattatttagatggtgctggaaaacaactgttttagtttacagaaaagaggaaaaaaaatgtcagaacatacgcatgatcacaatcatgatcacaaccacgaccatgaaggtcacgaacacattacattggtcgatgatcaaggcaatgaaacattatacgaaattcttttgacagtagatggacaagaagaatttggacgcaactacgtgttgctttatccagctggagtcccagaagaagaagatgtcgaattacaagcctatgcctacgttgaaaacgaagatggtacagaaggcgaattagaacaaattgaaacagaagctgaatgggacatgatcgaagaagtctttaacacattcatggctgaagaagaatctgaataaagaattgatggctgaacctttgatagtcaagggttcagcttttttatctaaaaaaccgtcagaaatgaaatagctcatttctgatggttttttttttgaattttaccacagccagttttacataaatcagttaactagaaaacaaagtttgtagtttttgatgatggacttctagaaggcgttgatataaatcagtttcgaaatcactgtaatggcaataatcaaggaccgtatatttaaaaggatctaggcccttcggaatcagcaaaggtgaccccaagatgataaagtcatattcttcagtgattggaagtgtcagctgttcgatagcaacaaatgggatctttttgcctaggtttaagatctcagcggaaatcagatgctcagaaacattgacaaaaccaactttcaacttatagttttcgtcgatttctgaataatacggataaagcaaacaagcttggatgaaagctaattcacttacacaagatttcagccacgtataatttttccgttgggaaaattttttccagaagccttcgattttgattgtcaagatatgtaagagtgggtacttttctttgatatacgaagaaataaacaatgtggtcaaagggattttttgtttgaacaagctaaagttaccaatcgataggtagatgttcaaatatagagctggctcattttcaaaatgaaacgtaccgataaacgtctgacaatggtcttggaattcgtccaaaatctccttggggtcattacttggttgctgataagaatgttggatgatcggcagacgaatgtcttggttggaagtcagaaacggccaataataaaacaaatagaacaaagagtttacctccaagaggtctaaacgcagattggcgatcttgaagaaatcgtaaaagaagttgaggtctgtaccacttggaatgaaagaatcccttgataagtgatagatatcagtaaagtggctgtttttgatcctcagcaaacaaatcagacaatggagactggcttgtttttttcctaagtcaaacttgttcttatgctgtgcttcttcatgtttataaatcaatgctctcacttcttggctataaggaactatgtccaaactttcacctaatgatacaaaccaaaagaaattaaaaaagaggatacgaatcaacatttcggaacctgacaaggtcagattcgataaattcaagttgatattgtattccttcaaatattcaaccagcttttttgtttgacgaaaacaggtcgagcgactgatatagtgccggttacaaaaagcagcgagatcgtcgtcctcttctattagcatactgagcaacaatttataaggaacactttcagttgaaaggtaatgttggtattgggtgtattgaacaagttgttcattgacggttaacttatttttactatgtaatagcttgatggtagtaaatttttctaaatcatcttggattgcgctcaagatttttttgaagcgtgcagggccgtaataaaaatccaagttttcccgcacctgatctatgctgtattccccgggtgagagtgtcatcaacttgccgtagacactcaatttcgttctggcatgatcatctaacaaaattttttcaatcaattgatcaccttcctttttttgtaattattattattagcgtatttaatttctcttgtaaatacgtgtctcagatttctaacaagtctatacaaggtttagaaatatttctatttcacttgtctcaaaaatagcgttcagcgagtatgttttttgagagaaaagaaataacccacaattttaaataacgatatcaatattttttttgcttccttgttagtgtgtttaatggatataaataactataattgaatatttagaagctgaaggggaaagaattagaaatattagtgaatcttttctttttttttattatctatttgaattttaaaaaaatttcgaaggaggcactaaaaatgaaaaagggaaagcatcttgtccttcttagtttgttggccatctttttcatcgcttacttatattctcaacacataaacaaggtagtagcaaatgatgaagatgttgttgatgtagtagaggtgttgaaaaatgattatggagaagtgagtatcaagcaaacagatgatcatttgatcctcttttatcgcttaaatgagtcaacacaagaaagacgatttttatttcagctgcatgccaaggatgcagctgaaaacaatttgcttacttcttacacttctcaggaataccaagaatatacagatgagaagcaacagaaatacatggacgtcagacaaatcaaaggcgaaacactttgtcagcggcaatcgttatgaaataggagaagaggactttgtcgagagtgctgcggctaaaggacaaatgatcgtcgctggtttagaggtcggagagtatgtattggaggaagtcaaagcgcctgaaaatgctgagatgattgccgaccaaacaactacgctatttaccatcatttcaggaagtcaaatgcctgtagcaaagacggtaaaaaatgatacgactaaagtagaaaaagacacgccccaattagaaggacaagatgtagccatcggtgaagcaatcaactatgagatcactgtcaatatacctgatgggattgccgataaagaggaggagagcaacaagtatacctcattcaaattgatcgatagccacgatcctgcattgacatttatgaatcagtccaagggagaaacaagctatgcactctatgatggtgaacgtctcattgatactaataattatcagatcactgaacatgccaatggttttacagtagcaattgcgcccacatatatcccttccctgactccaggtggaacgttgcgattcgtttattacatgtatttgaatcaactagcagatccgacgaaaggttataaaaacgaagcaaatgtcgataatggtcacacgacagatcaaacaccaccgactgttgaggttctgacagggggaaaaagattcataaaagtagatggggcagtgattgagctacggccattggcaggtgcatcgtttgtcgtacgcgacgaaaattcggcgaccgcgaactatttgatcattgatccagtcacaaaagcagtggcgtggacgaattctccggagaaagcaacaactttcaatacaacgaacgatggattagtagacattacaggattagcttatggaacctactatttggaagaaaccaaagcaccgaatagctatatcaaattaaatgaacgaattgctttcaaagtagatgcacaatcttatgcggtggcgaatgaattggttactccagaaaaagtaccaaacaaacagaaaggaacattaccagcaactggcggcgagggagttactttgtatattggtttaggtgtcgttttattgacgatagtaggtgtctactggataaaaagatataaggcttagtgtcaaacgaagaacgaatggatagctgaggagaatgaaatgaagcaaaaaaaaggcatactttagatctaatcatgctattggtattttttatcggtatcctcagcttggcgtatccctttgttagcgatacattgaatgactatctcgatcaacaaatcatcaaaaactatcagaaaaaagcaaaatctgaacatgcgtcagtgattgctgagttgaacaagcagatgcgtgaagcaaatgaaaaaatggcatcaaatgaacctaagacagaagcagacccattttccaaggaaaaaaaggaaaagcagaactcgctgaaatcttatatagaagcacacacgataggtgttttgacgatcccaaaaatcaatgtcaatttaccaatctttgatcagacgacaacaaaactattggagaaaggggcctgtctgctcgagggaacttcatatccagtcggaggagtatcgacgcatgcggtactttctagtcaccgaggattaccacaagcaaaactctttacagatctacctcggttacagatagaggatcgcttttatatcgaaatcaatggtcaatatcttgcgtatcaaatcgatcaaatacaaactgtcgcgccgacaaaaacagaaacacttcagatccaagataaccaagacctggtcacactagttacttgcaccccttatatgatcaatagtcaccgtttgctggttcgcggacacagggtcgcagttgagcaagaggaaataagcgcgtcattgtcaaaagtgcagcaagcaaaacgaacgacctttttactcgtgactggtttgatcgttgtccttttgatgctgtctttggtgatggtgataaaacattttacaaaagttaaaaatacatgtagttttaaaaactagattcaaaagttttggtaatcagatagtttttcgagtataatggagtcgaagaaatgaaacggagtggatcaagatggagatagaatttagtcgaaagtatcaaatcatcaatgaagtattaaatgcagtgacccatgggatcgcagcgttgttaagtttgttttgctttaatttgctgatggatcgcgcccataccaccttagattatgtcgcttttgcgatttatggaagttcgctttttctgcttttcttttcctctacgttatttcatagcctgatttttacgaaggcaaagaaagttttccaagtattcgatcattgctcgatctatctcttgatcgctggtacgtataccccattttgcctcttagtcgtacagggaatggctgggttgatcttgcttagtgtcatttggaccaccgcagtaatagggattatttacaaatctttgaggttgacaaaaacgaacaaagtatcgaaagtttcaacgatcatctacaatgtgatggggtgggcaatcattgttgtcttacctaagctctatcagaatatcgatttgaccggattactactgttagttgctggaggaatcgcttattctgtaggctcgctcttttatagtatgaaaaatagacgattcacccatgtaatctggcatttgtttgtcatgttaggtgcagcattgatgttttttgcgatttacgtaagtaattaagacgttgtgcatgatgaaataagaatgaacaaattgttgggacataggttcgttacactctcaaaaaaatagaagcactcgaaaatggtttatttttcgagtgcttcttgtttgaaaagggaatgcgaggaaatcctttatgactaaagcaaaaacgtgccgagcaatttagctcagcacgtttttttaccttattcttctactattttagctgatgcaggcaagcagtggttgacggcaatcgcaacggccatcccaatgaaactatcgatcacccggttaaaggcataaagataggattcagtttggggaaccataaataaaatcgtcaaaagggtagcacaggcaccgaccgttccttcgtgatagtcgaatttcactaataatgcgatcatcagcatgataacgaaaggaatcgatagcagctgaacaaggtgtgtgtagccaaaaaatttaaaaattccgatacagatgatcgatgctaatgcgccaaaggtatttccagcaatccgatgccggccgtatttgacagtagtcccatgatcttctcttaaggtaaagacagcggtgatcgttgaaacaacgtatgtctcacgctgtagaagaaaacttagaagaatacaaatgaagacgctgatccccgtttttagatttcgcaaaccaaattttaatccgaatagattcaataatgccatcctttcataagaaatcatcttaaccctttcaaacgaatcatatcataccataagctgtatttgctagtgaaaaaaaagtccgaaaggttgctgcaaaggcttttctttgtgaaaaaccttcgtggctctcctggagaatacgtcaatcagcttgagagtgatcaaaaaagagtgaataccatcgttggagcgaatcagttgcttggctgaccaaacaagcgtaacataatattgtaaacgttatcttattggagagcagggatagggatggaaaaaatttatcaagcaagtacggcagaaggcgcagtcgattttatcaacatgcgtgatttagaagaggcagcaaaagaagtgattcccaaaggaggctatggctacatctctagcggtgcgggagataccttcacttatcgagaaaatgaacgcgcattcaatcataagctgattattcctcatgtcctcaaagacattgaattaccagacaccaggactaatttttccggtgatacattaaatgcaccgattatcatggctccggtggccgctcatggcttggccaatgtcaatgcggagaaagcctcggcaaaaggagttgcgcgcttcggtacaatttacacagctagttcttatgcttcctgtacgctagaagaaattcgggcagccggcggagaacaagcacctcagtggtttcaattctatatgagcaaagatgatggcatcaatcgggatattttggcgatggcgaaacgcaatggtgccaaagcgattgttttaacggcggatgccacagttggtggcaaccgagaaacggatcgccgtaacggctttacctttccattggctatgccaattgtgcaagcttatcagtctggaatcggacaaacaatggatgcggtatatggctcctccaaacaaaaactgagtcctcaagatgtggcgttcattgcgaaggaatctgacttacctgtttatgtcaaaggggttcaatcagaagaagatgtagcacgtgcgttagatgctggagcacaagggatttgggtctcaaatcatggtggccgtcagttagatggtggaccagctgcttttgattctttacagatcgtagcagatgccgtcgctggcagagttccgatcgtctttgacagcggtgttcgccgtgggcagcacgtctttaaagcaatcgcctctggtgctgatctagtggcgattggacgtccagtgatttacggattagcgttaggcggttcaacaggcgttcagcaagtgttcgatttcttcaaaaaagaattagagatggtaatgcaattagcagggactcaaacgattgcagatattcgccaagcgaaactacgggacaatcattatatgtaataaaaaatagtaataaaaagagccttcctctgccgcacgcagccagaaattcaaagaactgaaacctttgaaagccacggcagcggggctttttttatggcttttttgtatctgggttgattataggaaatcaccggtatcaagaacgaactgctacgatttatttgatagtaacagtgtatatgattttgaaaaggagagaaaaccctgtacacttaaattaacgaaatcaaaaaggagagggtaaaatgattccaaaaatcattcattattgctggtttgggggcaatgaattaggggaaagcgaacagaaatatatcgaaacctggcgcaaattttgcccagactatgagatcaaacgctgggatgaatcaacgatcgatctttcaaaatttggttcttacttacaagaagcctacaaacaagaagaatgggcctttgtttctgacgttgttcgtttgtatgcattagtgacagaaggcggcatttatatggataccgatgtcgaagtggtgaaaccattagatgatctattaaactatgaggcatttatgggatttgagatcgaaaccaaaatttccaccggtatcatcggtgcagtgcctcatcatcctttcatggaagaatggtatcatgactatgatgatcgtgaatttgtgcgagcagaaaaaacggaagatgtagtaaccaacgtcattcgagtcactgaattgttgcaggaatatggtctgcaactaaacaatcagcgtcaaacggttaaaggggtagaaattttcccgcaaatgactttctctccaaaaagttatattaccggcgaagttgaggaagatccaactactatggtgatccaccaattttccggatcttggctataaacagttttttactgatccgatagttcgtcaagcagaatcccagcaacagttgaatgggcgcctgctgacgaactattttttattgtctttggcaatgaattatgccacaatagaacgaaatgaaatggatcggagtgagagtttatcatgggaattatccaatgtacaccggctgaccttgttgagttgaaagccatcagtattgagacgtatcaggacacatttgcgccatataatacggaagaaaatatgcaagcttatttagaggctgcttatcattcagaaaagttgcacaaagaactgaaaaatccgcagtctgcttttttctttttgcaagaagaagcaattgctggttatctaaagcttaattggggaacagctcaaactgagccgattgcaccagagggacttgaagttgagcggatctacatccgaagtgactacaaacgccgcggctatggtcagcaattgttgtcttttgcggaagagtttgccaaggcaaaacaaaagacgtctttgtggttaggcgtatgggaacacaatgccaatgcattggctttttataacaagatgggctttcgacgagtaggcagtcattctttcttcatgggggatgatgaacagaccgattatttaatggaaaaacaaatatgaagagagtcactcttcttcgattcgttgttgttgaaaaatcaaagtcgaaaacctgtcgatgagagatgccattagtgacttcgaaagagggagcaagaggaggatgaaaattccttttcaattaatagagcttccagtatagtagtaaatgactaactaaaaaatgaaaattatggtgacagatgaaggagacaagaatgggacaacaaaaaactgaaagtgtattatcacgatttttaaaaggagtcgttattgctttaggatttattttgccgggggtctccggtggagttctagcagcaattttagggatctatgaacgaatgctgcgttttatggcacatttaacgaaaaacttcaaagaaaatctgctctttttcttgccagtagggatcggcgggatcgttgggatcgggcttttatcgaaaccgttagaatggctgctgcaaaattatcagattgtcgtcttatggggatttgccggagccattattggtacattgcctgcacttgcaaaagaatcgactcttaaaagcaaacgaactatgggggatttgttttggttctttggtacaatgatcatcggtttcttatttctttatttcatgggtgatattctaggaacgatcccagcaaactttttaggatttgttttggccggcggattgattgcattaggtgtgttggtgcctggattaagcccatctaacttattgctcgtattaggtttgtatgatccgatgttgaaaggcttcaaggggttcgacattttaggcgtcttcttgccgatcgcaattggtggtctactcgtgatgctgctgttctcaaaattgatggagtggctcttggagcattatcattcgaaagtctatcactttattttgggaattgtgattgcatcaacagtattaatcgtcttgccaccagtggctgattatagcggatttacttggctgactgcggtcagcggtgtgatactgtttgttttagggtactggttaggggcttggatgagtaaattagaagaaaaatataaataaccactgcgtggataaaaaaacaatcggtcagatgatcgattgtttttttatggaatagaaaccgaggcaacctttgtctgaatagcgacgttcacacgtactatcctcactcccccttggaagataatcatgaaacgtcgctggaaaaaggggacaggatcgaacgggacaacttacatctgatcgctaagcgcccaaatttaaaaaaggatatatatataaaagaggtatcggacgatcctgcccaatacctttgtcatagtgaaataagcagaccaaagcgtgttgatttacctaaaaagaggtagaaatcacccagaaaattgggtacaataaacacgttgatgtactgcattgactatggcaaacttgatggtcagttgctgctgacaaatcaaggccctattccttagttgccgctaagggatggggtgccttttttggtttctattcgcttttattttatagaaagcgagggtataaatcaagggaacgtttccatatttaatgaaaaaatgcaagtgttttattagaaaaacgtgaaaagataacagaattctgtgagatttgtcaataaaagtcaatatttatttattgatatgagaaagactgaaaaaataaattttttcctgggagagccaagccatcaaagtgatgatttggctcttttttgtcgcttttttaaggggggcacttacgagtcctttattgtgttaggcgcaaaagtttaccaacttaacatgaacttttcataacgcttactggatgttaacgattgcttgataggatggagtaaatgagtaatgaggtgaaaagatgaatcatgataggctaaaggtacttattgaaaagagactgccccatatccctgcaagggattgtaaacgaaacacctccaaaagcaaacggattttggatcctcaaaaaagtatccggttccaacgtggacttgctaagaaaaagatgctaaatgggctagctataatagtaattaggaaatggcttttgagaatcagcaaagaccgacagatgggggtgacaagctatgtccattaaatcgcaaataaccgaaaagctgcttttactggttttggatggctgccgatacgataccgcggttgaacagatggggatcttgaatcatcatgtggattataaacaagcacaactgatcaaagtccatgctgaaatgcctagcagttctcggccattgtatgaagtgttggctactggtgtaccaagctaccggaatgggattctgaccaatgctgatggtcaacattccaaagaactctcgatttttgatcttgtcaaagctgccggcggaagtactgcagctgcagcacattattggcaaagtgaattattcaatcaagcaccttatgaaatcaaacgagatcgtattcaacacgaccacaaaaaaagtatccaacatggaatcttttatagtgaaaaccagtatcccgattcacatgtgttttcagatggacattatttactgcacacgtatcagccgaatttgttactgatacattccatgaatatcgatgccgcgggacatcgttatacggctgtttcaaaagaataccgaaaagccgtaaaccaagcagaccaattgattggcctgtatttgcacgattggttggctgcaggttatcaagtgattgttactgcggaccacgggatggatgaatatgggttgcatggcggaagcatggctgctcatcgcgaagtccccctctatattttttcagatatttttccgccagactgtgggatcgaaaaaatgaatcaattagagttggcaccactgatttgcagtttattaaaaatcgatacttctgaacgcatgcagattgggcgcagctgatttgtagaaacgaacaaagccgctaaagtcaggtgctcaaattagggcatcattgctagaggtctatttggtttggcttaacgggcataaatagatggcttatatcagatgaataagcaaaaaagtaatcgattgttgttccgctacagagaactgtgccatgagtgaaaataaacggacattgtaaatgagagaaagtggctgccgcgtcttggaaactgtgagagtgcctaggtactatagcagcagttgcgatcgttagaatttattgggttttgtttagatccggtcgttccgtctgtttgttgactgtttatgggaccgtcttttttaattagaacaaggcaacgaagtgctgctattctttgcacttttagacaaacgactttatttgtctaaatctgtgaaaaatagcggttgttatttttgtcacaaatagaagatactgctaccatggatttgtaccaatattaggaggggatcatatgagatatacaaacggaaattatgaagcttttgcaagaagcagaaaaccgaaagatgtcgaaaagaaacaggcctatattgttggtggcggattagctggattagcagcagcagtctttttgattcgtgacggacacatggagggaaagaaaatccatgtgctggaggagctgtctctttcaggcggctcactcgacggcaaatttattcctcatgatggctttgtcactcgaggcggccgtgaaatggaaaatcattttgaatgtttatgggatttattccgttcgattccatcattggaggtagaagatgcttccgtcttagatgaattttattggttggatcatgacgatccaaactcatccaattgtcggatcattcatgatcgtggccaacgagcagcagatgacggagaattcactttatcagcagcagcccaaaaagagttggtccaactatttatgacttcagaagatcagcttgttggcaaacggatcgaggatgtttttggagacgagttctttgaatcaaacttttggctttattggtgtacgatgtttgcttttgaaaaatggcattctgccatcgaaatgcgtagatatgttttaagattcattcaccatatcgatggattgcctgatttcacggctttgaaatttactcgttacaatcaatatgaatcgttagttaaaccattattagcttaccttgatgcacaaggtgtcgatttccaatatgaaaccaaagtcatgaatattgacgtgaagatcactgaaggagagaaaatcgcccaaagtatcacactgatgaaaaatggcaaagcccaagaaatcactttgacagcagatgatctggtgtttgtaacaaacggctcaatcacggagagttcgactgaaggggatcaccatacacctgcccctattactcatgaattaggtggcagttggaatctttggaagaacttggctgctcaatctcctgaatttggtcgcccagaagtcttttatgacaatctgccagcagaaagctggtttgtatcagcgacagtcacatggcaaaactttgatattgaaccttatatttctcgtttgacaaaacggaaattacggacaggaagagtagtgaccggtgggatcgtcactatcaaagattcaaattggctgatgagttttgcgacccatcgtcaacctcatttcaaagagcaaggcgatcaacaaacggtgacttgggtttatggtctattgtctaatacaccaggaaattatatcaaaaaaccgattgaacactgttccggacaagaaatcgttcaagaactattgtatcacttaggtgttccagaagatgaaattctacggatctctaatgaatcatgttcagcgatccctgtgtatatgcctttcatcacttcttacttcatgttgcgggaacctggagatcgtccgcttgtgataccgaatggttcacgaaacttagccttcatcggcaactttgccgaaacgcaacgtgataccgtctttacgactgaatattctgtacgaacggcgatggaagctgtctaccaattgttagctattgaacgaggcgttccagaagtctttgcttccgcctatgatctgcgtacattggccaatgcgatttactatttatcggacaagaaaaaattgactgagatggagctgccatttatcgaacgcaaattagtagaaggatttgttaagaagacgaaagatacctatatcggcgaaatccttgaaaaaaatcatttagtttaacacacttgaatgctgtgacatccgttacttaaagacaggatacccgaaagaaccagagaggccattaaacggcctctcttttcttcgaggttacgtatgtctgacggatggcactgtttttttgggaacgatttccatgctgtagacccccctgtgtgatgtacacaagagtagcgaaaaataagggaaccgctatcaaacaaattgcttctttttaataatacagagtgttattctgttatatttctattgaactttttcactctgtttggtatattggttgttaattaaaagctttttttgcttttagtacagaagctataattgttacgatgaaaggcgggagatttatggaagatgcgacctattgggcagagcaattaacgcagaagaaaatcagtttttcggaattgacagctaggatcgaagaaaaaattcagcaagttgagccaacgttaaatgcgcttgtttcttttgatcggcaagcagcaattaagcagtatgaacaaaatccgcaaacaaaagcggctttattcagcgggctgccaataccacttaaaatattgggtcaaagtaaagcggggtggccggccacatcggcggctgcattgtttgcaaatgcaaaagcagagcagacgagtgcatttgtcaacgggctggaacagctaggattgattcctttgggacaaaccaatgctccggaatttggtttcaaaaatgttaccgatccagtattgtacggtccaacacgcaatccgtggcagtccgcctattcggcagggggatccagcggtggagcggcggccgtcgtagcggctggactatttccattagctgctgctagtgatggaggcggttccattcgtatcccagcttctttcaacggactaattgggttaaaaccgacgcgaggaactatgccagtgggacctcaagaatggcgtagttggcaaggtgcttcgatcaattttgcattgacgctttctatgagagatacggaacgtttgttttatggattacgaacgtctcaaccggcggctccctatcaggcacctagaatcgaatggaaacatcatggacccagtcagaatcgaacactgagagttgcgtacacaaccgagtctccagccgggagtccagtttcacaaactgctgtcttagctgtcaagaaagctgtcgcatttttggaagatcaaggacatcaggttacagaaatccgttatcctgttgacggtcaaacgatgatggcaagctattatcgtatgaatggtggagagacagcagcaatgtttgccgagatcgaggcaatgctgcaacgaccagtggaacagaaagatatggagctgatgacttgggggctgtaccaatatggcaaaaaattagcggctgccgattatatccaggcattgcaatattgggatcagctggcagtaacgatggaagctttgtttgcagattatgagttgtttttgacccctgcaacagcacaaacggcgccattgattgaagaggatttgcaaagtgatacgattcgaagcgaactgcaagagatagaaagacgaacagctgctgctgccggagacttgatttatcagatgttcgacaaaagtttggcactgacgccctatacgcaattggccaatctaacgggccaacctgcaatcagccttccaacagctgttagtgaggaaggtttgccattgggaattcagtttatggcatcaaaaggccgtgaagatttactttttcaagtgggtgaattgtttgaacgatgggagcaatttcatttacccaaaaaataactgtcgatgaatgacggttcaagaatgattttctagggggataaagatggaaacaatcaaaataaacaagtggaaaaatatcgttgtactaggtgcctttgtgatgttgttaggtgcttgcggaagtaaggctaaagaggacaatagtttaagtcgtgttcaagagtcaaaagaattgactgttgctacgtcaggtacgttatttccttcctcttattacaatgatgacaatcaattagttggctatgacgtagacgttgcaaaagaagtagccaagcggatgggtgtttcgatccagttcaaagaatacaatgtagacggacaagtggcgtccttgactagaggtgaagcggactttgccgcaaatgatttcggtctcagcggagaccgtggagataagtttcgtctgtctgaaccaatcaagtattcatttgatagtatgatcgtgcgaaaaagcgatgattctggcattgcctctctagatgatttagcaggcaaaaaagcagcgggagaacccaatacaagctacatgaagttagccgaagaatatggtgcgaaacttgtgacctatgataatgccacgaatgaccagtatctgacagatgtggcaaacggacggaccgatgtgatccttaatgattattatctgcaaaagatgtcggtggcagctttgccagatattccagttaaaatcttggaagatgtctacttcaatccgaacgaaacaggctttctttttgcgaaagacaaccaagcactgcatgacgaagtcgatcgtgttttaaaagagatgaaagcagacgggacgttaaaagaaatttccgaaaaatacttccaaacagatgtatctgtaccatctgacaaagagatccaaaaggttgaaaagtaatgtatatcccaactcttgatcttccactgatgtgggagtcgcttccttttttactgacagggttatcctatacgttagggattgccattgcttcttttctcgcaggaaatgcgttaggtttattgctgacttttctggggatgcttcaaaacccttgggtaagaaggatcgttcgaggctatatctcctttctgcgaggagtacccgcattggtgctgttgtttttgctctatttcggattgccgtatcaattacccgcattgacagctgccattatttgttttagtttgactagcagtgcttttattggagaaatttatcgaggatcgatcgccggagtggatcgcgggcaatgggatgcagcgtatgctctgggattgagtttttctaaaacattacggttgatcattctgcctcaggcatttcgcatatcggtcccagcattaagcaatgtcgcgatggacctgttgaaaggaacctcgttagcggcaatgatcacgatcccggacatttttcaaaaagccaaaattgttggcggccggacgtttgattatatgtcgatgtacgtgttagtggcgatcatttactggttgctgtgtatcgggatcgaagcgctccaacatcgcttagaaaaacgatttgctgaccgctttgaaagtcaaaaaggctgatcgtcaaaaaagctgatcgtcaaaaaagtagctaaaaaaattcgctggttggattatttatgaatcaatctctttgtttgtggtacactttacaaaaaaggagtttggacaatgaaatatgaatggcgaaaacaagaaaaagcttactatttaccaaaagaaccacagctgatcgaagtgcctgcttatcaattcattacgttgactggcgaaggaaaccctaaccgtcctgaattttccgagcaaatcagtgcactttatatgatggcctatggattgcgcatgggattgaaaaaaggctccttcggcaatacgccttttgagtatacggtatacccgctagaaggcgtatggactttacctgaaaaaccacaaggaccgattgctaaagaagagttgatctataaaatcatgattcggcaaccggaacaagtaactgctgatttagccgccgaacagttgacacaaatcatgaagaaaaaagaaaatcgttttttggaacgaattcgtttcgaagaataccaagaaggctggtccgtgcaagcttgtcacatcggtccttttgacacagaaacagaaacgtttgcgaaaatgcaagactattgcgaagcccacgatctatcaattgttcccacgatgggcaattatcagcatcgggagatctatctgtcagatccgcgaaagacagcaccagaaaaagcaaaaacagtcttacgctggcgggtagccaaaacaaacaaagaatccgcttgatccatttaaccgttggtgtacttaatgaaaacacgtaatgaaaagagagagaaccgcgcttaagcgattctctctcttttactactcatcttttaagtagtcttcactggtgaattcactgtgaaaatacttgccttcgtcgccgtaataggtattgtaccgttgcttgaatttgcggaatccatacaccactaatacttttaagagacagtagatcggtattccgaaaatgacacctacgatccccatcaaatcccccataactaataaaacaacgagaatcgtgatcggatggatctgcagacgatctcccattacacgaggaacgaccaagtcaccatgaagcagctgtacggcgaaccaagcaatcaggaatttgatcagcattcctgttgaatcttgtgctgcgatgaaaagggccgggaagaagacgataaatggaccgatatatggaatgatacataaaattccggcagcgatcgccaagatacttgcatattctaaaccaatcagcaaaaaaatcacccaataaattccgcctaaaataaaggaagaaataatctgtcctttcagaaaggcaccaacttgtaggtcagcgatctttacgatcgtgttgaaatctttacgaaatcgcggtggtacgattgacaggagagaataataaaacttgtttggatttcttagtaagaaaaaagcaatgatcggacctgtaaacaatgcgataaacaacgttgagatcgtcgaaaagatactgctaagccctgcagcaccggtttgccaatagtcaccaatgaaatccatgatattgttggcaactttttgaagagtatccgtgatctgatcgatctgagcaccaaatggcgtattcgctaggaatgagtcagcgtttcgctcgaaatcagcaatcaaatctgggaattgattgatcaaatcggttgtttgtttttggatgattggataaagctgaaacccagccaaaacgatcactaaaagaatcagaagatagatcccgccaatggaaacaatgcggggaatctttttcgtttctaagcgatcaactaacggattgaacaaataatacaagatcaggccgaataaaaatggtggaataagagtagaaataatgacaaaaaaaggatcaaaaagaaacgagatttgtttaagtaaaaaagcagcgatcgcacagagaatgatcaatcccagtacataatagctggtttttcctcctaaaaattggattaaacggttttttttcatagaagagcctcactttcttagcctcattataacgaaagcagcactttctgtaaaaaaagagcgagtcaaaccaattttattttttacttttgcttatttgattcgtttatagatatgtaagggcgccacttacgaagcaatcaaaatacaatagaggaggaaaagaagcgatgaagaccaaaaccaccacaaggctgacgattcgaatccaagcaccagatgcagaaaaaactgtcagtcagaccgtcaatcaagtcatgaatgctccagaggaggctaagatgttagcgtttggtgaagccatggcaggattttctaagaatgcgtctttggctggcgtggtagaaacgatccagaatgagtacgtaaaataacgaaaggagagaaagcgatgaaaaagcttcatgcattatttttgactagcgagggcaaaaaacacacattgcagccaaaagtttttgatgaagagataacggcagaagcagcacgaacagcaatggagaatattacaaaaatcggtatctttgaatcagatggtgtccgttattacaatgagctgtctggcgccaaaatcgtagagacgattgagacgccattgttttgaaataagttgaagtagaacgttcatcaagaaatgctcgacaatcaaaagggactgtgccataagtcagtatccaacaagttaaaccgaataatagtctgttgctagcatagattcctctgacttttgcgacgaggagtccctgcaccgcaggagcaataatcattaatgttcggctagtgttacttgtaggagacttatggcacagtccctttatttggtgacggcagttaatgtacaacgtccgacagccgttttcgtgccatcggattgtctgatcgtagcttgccaagtttggatctttccaccgattcgatcagggacagcttccacagtaacagttccttgtttgaccgcttttaaatgattgacttgtagatcaatcgcggcggcaaattggtcttcagctacggcttgatttgcccccagactacaagctgtttcaatcaagacggcattgataccaccgtgcagaagaccaaaaggttgtttatgctgatcggtgaccactaaagataaccgaacctgagtagcggttgtttcttcgatctggatgcctaaatagtcaagtaagttcatagagttcctcgttttctgagaatttgatgatttgattataacaaacgtttgacagaaagcaatttctaacgaaattcgctcagaaatgtgtataatggaaacatgtgacataaggaggaacctgtaatgagagaatggaaaaccttaaaagaatacgatgaaattttatttgaacatcatggtaaagtggcgaagatcacgatcaatcgtccagaagtccacaatgcctttacaccgaaaacggtgtttgaaatgatcgatgctttttcaatcagtcgcgatgaacctggcattggggtgatcattctaacaggagctggcgacaaagctttttgttctggcggcgaccaaaaagttcgcggacatggcggctatgttggtgaagatcaagttcctcgtctcaatgtgctggacttgcaacgtttgatccggacattaccaaaaccggtgatcgctatggtcaaaggttggtctattggaggcggaaacgtgctgcagctggtttgtgatctaacgatcgcggcagataatgcgaaatttggtcaaacaggaccgaatgtcggcagtttcgatggtggctacggttcaggctatcttgctcgaacgattggccacaagaaagccaaagaagtttggtttatgacgaaacagtatacagcagaagaagctttagcaatgaactggatcaatacagtcgttcctcttgatcaagtggaagatgtgacgatggaatgggcagaaacgatgctgcaaaaaagcccattggctttgcgcatgatcaaagcctcaatgaatgccgatacagatgggctagccggaatccaacaacttgctggcgatgcgaccttattgtattacacaatggatgaagcaaaagaaggccgcgatgcgtttaaagaaaaacgtcagcctaatttcgaccaattccctaaattcccttaatgaatggtagttggctgcaacggcaagcacaacttcatccagaacgaccagctttttattggcaagataaaagctggtcgtttgctgccttgcaaaaagaagtcacggcttatgcttgctattatgaacatcggattcctcaaacaatcgagcgagtagcgattttaagcaataactctcctgagatgtatttcacgattttggcactttgggaattaggaaaacaaattcagttcttaaacactcgattgactgaaaaagagctgtactatcaattaaccgatgctgcctgtcagtgggtagtcaccaatcgatcgctttccttgccgagaatcaagttcctgccttttggcaaattgcaagaacgttttttttctgcgccgatttcgatttaccaaaaaacacaagttgcatcgatcatgtacacttctggcacgacgggtaatcccaaaggagtgcctcaaacatttggcaatcattttgccagtgcacaagccacgcagatcaacttgtcggtgactgctgacgactgctggtgttgtgtcgttccgttgtatcatattagcggtttatcaattttgttgcgttccttgattttagggatcagtgttcgattatatgatcgattcgatgcgcagcaaatcgcatcagacctagctgctggtaaaggaacggtgctctcgttagtgaccaaaatgctgatcgatcttttgcctttgactggagacaatggttacccttcattgcgctatattcttttaggtggtggtccgattgccagatcagtcttgatgcaatgccaagacaagtgcttatcagttattcaatcctatgggatgactgaaacttgttcgcaagtcgttgctttgcctccagataaagccgaggaaaaaattggttctgctggattaccattagcccaagtcaatttgcggattcagtcgcagtctttgaaagaatctgttatcgaaaaagaaggaaaactgggggaaatccagttgcaaggacctgcgatcgttacgtgctatttgaatgatcgcgggttggagcagtggacgcaggatggctggtttgccaccggtgatcttggctatttggattctgaagggtatttgtatgtggtatctcgtttgagcgaattgattatttccggtggcgaaaatatttatccagctgaagttgaacaggcattagttagccaccctgcaattgaagaagcggcagtggtgggcgagccaagtggagtgtggggacaagagccagttgcttatcttacactcaaagagccgattacattaccagaattgatcgcctatctaaccccacagcttgctcggtacaaacacccccgtcgctattatcaagtaaaagaaatgccgcgtaccgctagcgggaaaatagtaaagcgtgtattgctgacagaagaaagagtgaactacattgaacagcaaatcaaagaatgagtatcaacatgcattagctgctggcaaaaaggtgtttagtcattattacccacttgcaccttgtgattttgttcagttatatgctgctgccagtcaatttattggtgaacgttatttttggcgatcatcagatcaagcaacctgttttttgggtatcggcagtgtgaaacggtacgcgaacccatcattgattgattttgagcggcagcgtcgaaaccttaaaaagcagcattttcaaccaaatacggaccaaatggctgctacattattaggggcttttgcttttgatgaacaaagccaaggagcagcagaatggggcacaatcggcaatggtctttttgtgttgccgaaaattctttttagaaaaataaatgatgtgtatggtgtgatcttgaccgtcgaagcgaaggatacgaatgacgtggaaacgctgttcggacagtttgctgatttacaacaactcgttgagcaatggggaaagcaagcacaacagcctgtaggggcttgtttgttgcagcaaacagaattagacgtaccacaatgggtaaaagcggtcgatgagacagtcgctgcgatccgctctgcaaaaacgcctttggagaaggttgttttagctcggcgaatgaaaatcactactaagaaggagattgattcctttgcggtgttggcccgtcttgcagagcaacaaaccaatacctatctctttgcttttgaagacgaggtttcgtttattggtgccacaccggagcgcttgttaaaggcgactgccagtcatttcgagacagtcagcattgcagggtctgcgcctcgaggcagcacaccagcagaagatcagcaaatagctgatgcattattaactgatcccaaaaatacccatgagcatcaagtagttgtcaatcgtctggagcaggcgttgtcttccttattggcggaagggttccattcagaggcgcgatcgatcatcaagaatcgcgacattcagcacttattcgtgcctttgtctggcaagcggaagcccgctgtttcttttttagaagcagtggctaagctgcatccaacaccagccctaggtggggagccaaaagctgatgcgctggcatggattcgtaaccacgaacctgcgcgtcggggattatatggtggaccaatcgggtggctaggtatccaagaagatatcggagaatttgcagtagcgattcgttctggtgtttttcatgggacagaaggcatcctttacgcaggatgcgggatcgtcgccgattctgttgcagaagaagagcgccaagagacagccttgaaattccaacctatgctaagaggagtgatagagaatgaatcagcaagtcatgactgactacttgttggcagcaatccatgggtttaaagccgctggaataaagcgagcggtgatcagtcccggatcgcggtcgacaccgttggcattgcttttgcatcgggatccagaaatcacttgttggatcgatgtcgatgaacgttcagcagctttttttgcgttgggaatgaccaaagtcgatttgcagccgacacttttactatgtacatcaggtactgctgcagccaattactatccagcaatttgtgaggcggaagccacaaattttccattgatcgtcttaactgctgatcggccaccggaactacgtggtgttggtgcaccgcaagccatggatcagcaaagtctgtatgcttctcatgtaaaaaaaatggtagaaatgactgtgccggagaatacacccaacatactgaagtacagcttttggcaggctgccacgacaacgatcgaagcattaaagcagccacgtggtcccgtacacctgaattttcctttgcgggaaccattactgcctgacttcacgcggacttgttcgatccaacaaaatatcgcttacctccctacacagcaatcgctacctgcagctgtattgacagaactggcaccattgtttatgaaaaaagggctcctagtggtaggtgaaagtttgacaccttctgaagcagaaacgctgcatgcgcttgccaatcatcttggctggcctctagtgggggatccactgacaaatttggccacttgcggggaaacgtcggctcattttctcccacaggctgatttgatttttccacaactagatgcggactttattcccgaagtcgttattcgttttggtcgcttgccagtgaccaaaaatgtcttgctttggttaagcggtctgccggaaggcatcgactggcttttcgtggatgaatctggacagtggcaagatcaattgcatcgctcagcctttttgctacagcttacgatagaggattttgtggagcaagtaagcaagttgcctagcagaccacaaccagaatggtttcagccatggcaaaagctgcaagccgtcgctgaggaagcattggcaacgactcattctttaacggagtggaatgaaactgctgctgtacggatcttgcaacaaacattgggacatgatgcccaattgctcttagcaaatagtaatgcgatccgctttgttgatcgatacggaacggttacaggtagtgcttaccaagtatttggcaatcgcggtgtgaatggtatcgatgggttgatatcgaccgttgctgggatcgcagctgccagccaaaaaccgacctatttattgattggcgatctagctttctttcatgatatgaatgggctgcaattgctcaaacaatatcagctgccagtcacgatcattttactgaataataacggtggggggattttttccttcttatcgcaaaataccttgtcagaaagtgactttgtgccgctatttggcaccccgttggatcttgactttcagcaagctgcaaaactttatggcgcgaaatggcacgctccagcaactttgactgattttgcctcccaaatcgagcaatcattaacgacgccttgttttcagatcattgaagtagttggcctgcaaaaagatcctgtgatcgcttggcaagcgttgcaacaggagtttcaggaaaggatctccaatgaaaataaacgttaacggtgtgaactatttgtatcagtggtatcgaccttatctggctgatctgccgaccctcgtagttctgcacggatttactggcacttcagattcttttcgcccagtgtttgctcaagaaacgtccttcaatgtcttagcaatcgatttgttgggtcatggtggttccgccagtcatgtgcacccgttacgctatgagatgattcagatggtaacggatctggcagaattggtggatcgtttaacggttgaccgttattatctttatggctattcaatgggtgctcgtacggcattggcatggacggttgctttcccagacaagatcgctggcttgatcatggagagcggctctccgggactggaatcagaatctgcccgcagtcttcgccgacgcaatgatcaacgtttggcgatacgattgattcagcaaccgctggttgactttgttgattattggcaagaactgccattgtttgctagtcaaaaacgattaccaaaggaaatacagcagcaagtacgagcgacgcgtttgagccaacaggcgtttggtttggcgatgagtttgtactatagcggaacaggaacacaacctagcttctggcaaaatttggcagacattcagtgcccatttctggttctcactggagaatgggatgaaaaatttttcctgatcgctaaaaaaatgcagcagcaacaaccagcgttgactatcctctcggtgtcaaaagccggtcattgcgtgcatttggaatgtccagatgtagtggcaaatgaagtgcatgcttggttgaccgcacactgatattggaaaaggagagcgcgtatgaaaatcgtcaaagcagaacggattgcttgtcgactcccgttgaggcagccttttgagacgagttatggtcgcttgacggaaaaagcatttgacctgcttgtactgaccgaccaagacggaaccgtaggtgttggagaattggtggcttttcagcaaccagattatattgaagaaacgttggcttcagctcgagaagtcattagcaagttcttattcccattgctgacaggaaacatcgatcatccgcgagatgtttggacgttatttcaaacagttcaaggaaattttatggccaaatcagcagttgaaacggcgatttgggatttatatggccgccaaaaacattgcagtctgacctctttttatccaacaacaagagacaagcttgctgtaggggtcagtgtggggattcaagcatccacagaacagctagtcgcacaagtcgctgattatgtagcgcaaggatatcagcgagtaaaaatcaaaatcaagccgggagtcgacttagagccgttgacagccgttcgggaaacctttcccgagctattgctgatggctgatgcgaacggcgcttatgaagatcaaccggaaaagattctcgcattagatgaattggggctggcaatgatcgagcaaccgttgaagatccgggatctagtggggcatcgccgtctgcagaagcagttaaagacgccgctatgtttagatgaagatatacgtactgcagaagatgtcgctgttgttgcctcattagatagttgccgagcaatcaatctaaaaattccgcgagtgggaggaatcaccgaagcgatgcgaattgtttcagcctgccaacattatggattggatgtctggctaggtggaatgttcgaatcaggagtgggacgagcgttgaatctgcagtttgccagccaagctcccttccacttccctggtgatctatctgcttctgatcgttatttttacgatgacatcgtcactgaacctgcgaagatcaaaaatggctgtcttcaggtgcctgttggtgtgggagcgggcttcacactagatgaaaagaaaatagctgactattgtgtttcccgtactcgtttgttaggttgaactttagaaatagtttttgatcagcagatcaattatcaagcagcaaaaagcaccttctcgcttttagagagggtgctttttgctgttatttggataaaagggcgtgcaagcgcctgttgctaagcctgttctttaaattctttctcaatttgcaaacggcgaactttcattgttgctgtacgagggatcttttcaaagtcccagagaattggctgattcaaacgaggaagatcttctactgcttgccaccaagctgtccaatccatttcacggtttggtgctaaggcaatgatcggttgcggtgaattttctttgtcacgaacgatgaccacttcagctagaaaatccaatgtatctaaaagcagatcttctaaagctaaattactatcgatggattcaatcagatccacttggcggtctttcaagaataaatgcccttcttcattcatgctgccataatcgccgctatcccaccaatctccataaacattctcagtaaaacgctgatcttctttataataagtcaatgcccgtcctttggataggaagtggatatgtccgtctgtatttgcaggcaactcattgccgtcagcatctgcgattcgtgctttggtcaaatcgcctaaaccaatccccatatcgcgagcatcatttgattgtatactttctagcgtatgtgctttcaggatcattgggccgcactcgctttggccgtatacttgcaagaagatggcatcttgattggcagaagtttgtaagaaagctgccattgtttgattattgatggcatcgaatgtggagtgataataccgtattccagcaaaagcttcaggatgttcttctgcaacgaatcgccattgcacgaagttatttgggtgtgtctctaaggcaatcggtggattctctttcaacatccgaacgacgtgaggaccattcgcactagcaagaggcatcattggaaagcccatagacatcaaagaagagatcccaatattgaagcgagaatgaaccggtgaaatatggaacgccactaattttgtttctgcgatttttgtgaagacagttcgctgccactttgtccgccaccccatagaattggccgagtgacaaatcaattttggtattcctgttgtgcctgaggtgtgggtcatataagaaatttgatcgtgaggcaattcggtttggccaacaggttcagctggttgcaacaatagattgcggacagcaatctgcttgttcgggctgctgtttttgacagctgccactcggttttctgtctcttcaccaaaaaggatataaggatcttctaagcggtcaacaaagacttcgatcgttgaagctggaaaatgataagaaatcattgctgggacagcgcctaaataagcagcagctgtagctaaaagatacgtatcaaattttgatgatttatagataatgattttatctccggcttggacgccaaggtgggcaagttgatacgcccgctttaagattatttcatgacttgaatgatatgtgctgcggtaacccaattcaggaaaagctggcaagatctcatcatgaatgattgggacgtctggataagcctccgccgcatcgcggtaattggtataaagattcaatggttgatacgctaaaatagacaaaataacacactcctttaaattgatgacggtgttttgttaacttcgatggttaataaagtcacctttctcaaactatggttcattttaacatagcgtttttttaagaatagttactttgggatttttttcacataacgtcttaaatcaactgacttacaagccgggtagggctattttgagacaatcaagtttgattagtgatactcgattggtatgttttgattggcacaagggcaaccgaggatagttagaacaaaagattctattgcgaacatcagcaggacgatagttgtcagtatgtctttttattgctatcatgaaaaaaaagacaaaggaagatcctgatggccaaaaagatacaaaataaaaaacatgtttcgcttcctcgataccagcagatcgctgtggagatcgcggaaagaatcgtggaaaatcgctacgaagttggacaaaaggttcatgcccgttcgacattagccagtaacttcaatgtgtcgccagaaacagcccgtaaagcaatcaatgtcttggtcgatttggggatcatggatgtccgtcatgggagcggcgcgtatattgcctcaaaagaaaaggcgcaatcttttttggatcagtacaaagatgttcaatcgatccaagagattcgtaaagacattttagaaagcgttgaacggcaacaacaagagctggataatttttcggaactattgaatgttttggttcggcaaacgaaaaaagtgcataatatgagcccttttctgccatttgaattgttattgaaagaagatgcccagcacttagagaaaagtgtccacgagctgaatatttggcaagtaacgggagcaaccatcgtggcaatccaaacggaacaagagttattgctctcaccaggcccttacgccaagtttagtgccggcaatacgatttattttgtcggaaatgagttggcactacaacgtatgacgaactttttttatccacaagactccgctaattgaagagcgaaagattccatttctaagaagagatggaatctttttttgacaaagtgaccacatgctgttagtatagtatggtcactttcgtgaaatttttcagaaaaaggagtcagtataagtgagtaaagttaaagttgcacatttaacgaaaatctttggcaagaagaagcaacaagcgtttgccatgattcaagaacaacgcagcaagaatgaaattctagaaaaaactggggccactgttggcgtctatgatgtgaattttgaagtcaatgaaggagaaatctttgtgattatgggactttctggtagtgggaagtcaaccttgatccgtttattgaatcggttgatcgaaccatccggtggagacatttatattgatggggaagacattgcgaagatgagtaaagaagaattacgtgaagtccgacgccataagatcaacatggttttccaaagctttggtttgttccctcaccgaacgattcttgagaatacagaatatggcttagaggtgcgaggggttcccaaagaagagcgagtagccaaagctgaaaaagctttagctaattctgggctattatctttcaaggatcaatatcctgatcaactgtctggtgggatgcaacaacgggttggtctggcgcgagcattagcaaatgatccagagatcttattgatggacgaagcattctctgcgttagatccgttgattcgtcgtgaaatgcaagatgagttgttagaattacaagccaatgtccaaaagacaattatttttatcactcatgatttgaatgaagccttgcgaattggtgatcgcatcgctttgatgaaagatgggcaaatcatgcaaattgggacaggagaagagattctgaccaatcctgcgaaccaatatgtgagagatttcgtcgaagatgtcgatcgctcgaaagttttgacggctcaaaacatcatggtaccagcactaacgacaaatatcgaaatcgatgggccaagcgttgcgctaaatcgaatgcgtaaagaggaagttagtatgttgctggcggtagacaaaaaacgtcatctaaaaggtagtttgacagccgagtcggctcgcgaagcacgcaaaaacaatttgaccctaaaagaagtcatcgataaaaatgtacaaaaaatcgacaaagatatgctagtgacggatattttcaatttaatttatgattccccgacaccgttagcggtggttgaaaatgatcgtctgatcggtgtagttattcgaggcagtgtgatcgaagcactggcagaaacggattcatcagtgacagaggaaggagtggtcgtcaatgggtaattttcttcaacaaacgattccagttgctgattgggtagagtcctttacagattggctaacaggaacttttagtgggctcttttccgcattgcagtcttttggtcagttcgtgatggatggaatgactaatactttgctttttgtgccaccactagtcatgatcttgctgctgacaatcgctgcattttttgtttcaagtaaaaaatgggggttgacggcatttacatttgtcgggctactgtttatctacaatcaaggtttgtggactgatttgatgaatactgtcacattggttctgctctctagtctggtatcgatcattatcggtattcccctcggaatcttaatggcaaaaagcgaaaaggcgcaaagcatcgttacgccaatcttagatttcatgcaaacgatgcctggcttcgtctatctgatcccagcagtcgctttctttgggatcggcatggtaccaggggtttttgcctcagtgatttttgcattgccgccgactgtacggatgactaatttaggaatccgtcaaatttctcgtgaattagtcgaagcttcggattcctttgggggaactggctggcagaaattggtcaagttagaattgccattagcgaaaagtacgattttagcaggtgtcaatcaaaccacgatgcttgctctttcaatggtagtgattgcttcgatgatcggtgcccctggtcttggacgaggtgtcctatctgcactgcagcgggcacaagtcggaaatggatttgtgagtggggtttcattagtgatcttagcgatcattatggatcggtttacccaaaacttgaataaacccgctcataagaaaaaagccgtgtccgcgaaaagccgcaagcaaaaacgtctctttggcgggatcgctgccgcagctgttgttgcgctgattggtgcttctgtagcttttggtcgtgtttcagacaataaaggaacagtcaacttagcatatgtcgaatgggatacagaagtggcttccactcatgtggtagctgaagtgttaaaagaaatgggctatgaagtcaagacgacaccattagacaatgcgatcatgtgggaatctgtggctaaaggcgaagttgacgggatggtagctgcctggttgccttcgactcaccaagctcaatatgaacaatataaagaccaagtagaaaatctaggaccaaacttagagggagctaaactgggaattgcagttcctagctacatggcagttgactctatcgcagatctatcggatgaggcaggaaaaacgatcacgggaattgaaccaggtgcaggtgtggtcgctgctgctgaaaatacagttgcaacatatgataatctttctgattggaatgtggcgacatcttcttccggggcaatgactgtggcgttaggacaagccatcaagaataaagaagacattgtgatcactggctggtcgcctcactggatgtttgcaaaatatgatttgaaatatctagatgatcctgaaggaacgatgggagaagcagagagtatcaatacgatggtacgccaaggattagctgatgatctgccagaagtttatgaagtactggataaattcaattggacacaagaagatatggaagaagtcatgctgtcaatcaacgatggaacttctgctgaagatgctgcaaaagattgggtaaccaatcacccagaagaagtggcagcttggacgaagtaagtcaatgaagcatgaaaggatcagataaataaacaaaaaaagaaagtttcgcatctagactcggtggccgagttcaggtgtgagactttcgtttttttcactatctactgactgtctactgatagtagccagcaattttttgtgctttttcagtattggcgaaatgcagtttggtatacttcgctaataaaggcattccgcctttttgcaaaagctgagcagcgacctgatcggatttgctgccggcacccgaaggaagctgtaatccaacttcttgtgaggccttctctagttcctccagaaaaacagtgcggcatagaatggaggccgcagccactgctaaatgatattgctccccttttgttgcaaaaaacaatttttctgtgatttgatttttttctgattttagataggtacggtaatttttttcgctagtgaattgatcaatcaagatagcatccggtgtttttggtgcgattttttgcaacagtagccgaatggcttgattgtgtagcgcaactttcattcgaacggtgttgtatttaggttggatctcattgtatttagttggttcaactgtcagtaattgataaggcacaagtttttttatttttggggccattgcccgaatttgtggatcagtcaacattttggagtctttgacacctaatgctttcaatgcgggtagctgatctttactggcatagacagcgcaaacgactaaaggaccaaaataactgccattgccaacttcatcactaccaacgacactccactgtgaaaagtcagcaggcaaggaggatgaaggagccttgttgttcgcatttgctgttttggacaagtcggcagaattgctccaacgagctgcttcagcttctgcaccactaccttgaaacatcactttaccagaagtataagcggtgatggtcgtttgttcttttttggcaacaaacacggtataaggaacttttttattcaacagcgcttgctgatagaagttcatcatttctgcgatagttttttgagatactttaatgacgatattactcattgtcttcctccgatatacatactggttatttgaatagaacatcttcttagattctaccataggtaaaaattttacgaagcctctttctaaaaaaacgattggcatggaaattacactagaaatcacgtataataggtaggagtttgcgatacgcgtgcagaaagtgataaaatagtacagaacagcaatgggaggaatctttcctatgacggagcaaaagaaacgttataaagcagtaatcgccaatcaaagctacacgattattgggcgtgaaagtaaacaacatatggatatggtaacgaaattagtcaatgaccaattgacagaaatcatggggctgtcttctcaagtcgataaagagcaagcagcaattctattagcaatcaatgcgatttctgatcagttgaaaaaacaagagcaagtattaagtttgcaaaataaggtagaagagttacgcagtcaagcgattaaggcgaccgaactagaaaatcggattaagcgaatcgaagcgattgagtctgaagcgcgccaagtattggatgagacaggtcgcggagatgtggagatccataatcatgtggaagctcaacaaatattaaatgaacaacgtaagcgcaaaatccaagaaaaagcagctcatggttaagtaggcgcggaaaggactctgaaatgataggatttttggttctggttcttttgttagcggcattttatggtggcgcgcggcgagggacttcattgcagctggtctccgttttaggataccttttttcttttttagttgcagtggcaaattaccaagctttggcaaaaaaaattgaattatatgttccttatatgtctgtgaccgcagactcaaagttggtcttttataacctagatcttgctctagacctagacaaagcgtactatgcagctgtcgcttttattatgatcctttttgctggctggttagtgacaaaattgatttgcatttttgcaaatggactgcgtttcaaacgtctgcgttttttcaaaggctatgattgggtcgtagcagggatcttgaatacgctattagtttacctgaatatctatttcttttttatgatcctctcgatgattcctttagcgactatccaaaatttgtttgataagagcagcacggcacactttatcgttgaaagttcgccaatcatttctgattacttttatcgtttgtggatcactaatgtgattggttagtataaggcagctggtcattagacccatgctgctttttttcttaagtaaaaaaatgaaaaagtaggtgagactatgaataaaaaaattcttgatgttttagctttcgatcaagtaaaacaattggttgggcagtatctagtgaccgcccaagggaaagaagaattagctcaattagcgccatcagcagatgctcagcaaatttccacttggctggctgaaacagaagatgcgttaaaagtacagcgattgcggggcggtattcctgtaccaaaaattgaaaatattcgtccgcaaatgaagcgaatcgaaatcggagcggaccttaatggtttagaattagcgcaagtaggtcgagtgttggtgacagccaatgaattgaagcgtttctttgaagatctatcagacagcgaaatcgagttcgagcgactgtatgaatgggaaaagcagttagtaacgctgcccacgcttagccgtcgcctgaaagaagcagtggatgaagacggtcggttgactgacgaagcatctccagagctacgtgtcattcgacaaaatattcgtcgttctgaacgaacgatcagagaaacgttagatagtctcgtacgtggcggaaatgccaagtatttgagcgataccattgtcacgatgcgaaatgagcgttatgtgattccggtgaagcaagaatatcgtggcgtgtttggcggggtcgtgcatgatcagagttcttctgggcagacattatttattgaaccaaaacaagtggtggatcagaataatcgactgcgccaacatcaaatcgctgagcgtacggagattgaacgaatcttagcggaactttctgcagagctagctccttatcaacgcgaaattctgcacaacgcctatgtgatcgggatgatggacttcatgaatgccaaagcacgttttgggaaagaattgcaggcaatcgtgccggctatcaatacagataatcatgtcgttttcaaacaagcacgtcatccgctgatcgatcaagaaaaagtcgtaccgaatgatattgctattggtgaagactatcaagcggtggtaattaccggtccgaatactggtgggaaaacaatcaccttgaagacgctgggattgcttcaaatcatggggcaatctggattgccgattttagtcgatgaagagagccaaatgggcatttttcaagaaatttttgctgatattggggatgagcaatccatcgaacaaagtttatctaccttctcttctcacatgacgacgatcgtcgatgttctcaaaaaagtggaccatacaagtttagttttattcgatgaactgggagctgggactgatccgcaagaaggcgcggcgttagcgattgctattcttgatgaacttggtgcacgctctgcctatgtgatggcgacgactcattatccggaattgaaagtgtacggttacaatcgtgccaataccatcaatgcttcaatggagtttgatgtcgataccctaagcccaacatatcgtttgctgatcggtgtgcctggtcgcagtaatgcttttgaaatctccaaacgtctgggcttggacacccagatcattgagcaagccaagcaaatcatggatggcgaaagtcaggacttgaatgagatgatcgccgacttagaaaactggcgcaagatgaccgaaacagagtatttggaaatgcggcattatgtagaagaagcggaacggctgcaaaaagaattgaaacaagcatataactttttctttgaagaacgcgaagcagaactagcaaaagcccgcaagaaagcaaatcaaatcgttgaaaaagcaaaagaggaatcggaaaaaatcatttcggatatccgcaacatgcaattgagcagcggacagagccatgtcaaagaacatgagttgatcgcagcccgcacaaaattgtctgatcttcatcaagaagaacatttgcaaaagaacaaggtcttgcaaaaagccaaagctgcgaaaacattgaaggtcggcgatgaagtgttagttacttcctatggtcagcgaggaactttgatcaaaaagatgggacaatcacaatggcaagtgcaattgggaatcttaaaaatgacgctgcctgaatcagatctacagccggcagcacctgtcaaagaacctgtgcagcgcgtcgttcataccgtccgttcagcggagtcttcacatgttcctaatcagctggatcttcgtggcaaacgctatgaagaggcattgaatgaagttgatcagtatctcgatgcggcgattcttgctggttacccacaagtgacgatcgttcacggaaaagggacgggggcattacggcaaggaattacggaatatttgaaaaatcatcgtagtgtcaaaagttttgagtttgcaccggcaaatcaaggtggcaatggggcgaccatcgtaaaatttaaataatcgttaaggcttcttaccttttgtaagcagaggattttaaaaaagcacgtgaacatgctatactttttttagcaatcaaatggaggcgaacaatatggcaaaagaaattacagataaaactttttcagaagaaaccgataaaggcttagtacttattgatttttgggcaacatggtgtggtccatgtcggatgcaagcaccaatcttggaacaattagcaaatgaatatgaagaagacgaattaaaaatcgtcaaaatggatgtggatgaaaatcctgaaacgccagcttcatttggtatcatgtcgatccctacgctattgttgaaaaaagatggtcaagtggtagataaagccgttggtgttcataccaaagatcaattgaaagaaatggtagcaagccacatgtaagaaaattttatagtaagcagcgatcttaagcgatcgctgctttttttttgagtagttttaagcgaggatttattcttgcaatggtataatgaaagtgtgaatatggggagcgtctactttctatggagtgcttttatttgaaaagggggatgaaaaatgaaaaagaatagaggatgggggtaccggctgctctgtatcatttccttggtcagtgcaccgcttgtatctgcaggtgcgacctacgcggaaacaattgatacaggaacttcttcagtcaatcaagtcaccgaatcaaccaccaataccagtaggacgacaaccgaaacgactgactcaacaactgcgacatcgtctacaatagacacgtcaacttccgaagcgagtaccaacagttcgactgatagctttggggaaacaactacaagtagttcagaaataactgtttcttccacagaagaaacggatacttcagaagcgaatccagtcatcactgttaaggaattagccaattcaaatcgctatgtcaaaatcaacactttcacagcgactacaacggagtcgcaagcaatggatagtcgtcaggttttatataccctcaatcaattgcaactaacagccacaggatcaattactgaacttgcgggtcacgtttataaaagtgtcaaacagtaccaagatacagcgacgaaaaagaagtatagtgaactacttgatgaacagaatcacgtgattggtattgttgaagcagagtctgtcacgacagcagatggggtgtttcagtcagaaaaaaaatatgctactgttcaaagtggcaattatcctttatgggagtcaattttttttgataaacagttagtcacgacaaaaacaatcaatcaacaaacgtttcaagtaaaagaaagtttcaaacacggaaacggctcgacctattatgctctgtacacggataagaaccaatttattggttggattaatgccaaaggagccgcggatgccaaatcacctggaggcatatggcaatctgaatcaaaatacgccacgatcatcagtggcaactacacattatggcaaaattttgattggtcagccaaaaaaggaacgacagctgctttgaatggaaagaccgtcaaagccacaggaaaatatagccatgttaatggtgcaacgtattattcgttgtatgacaataagaacaagtggttaggttatatcaacgctgccggtgtcaaaacgacatcaaatgcacagggagcttaccaggcttacggtaaatatgttactctaacaaagaaaaattatacaatttggggtaattttaactggtcgagcaaaaagaacactacctcttcattgtatggaaaaacttaccaggctaaaggaaaatatgaacattggaacggatcaacttactactcattgtctgattctactggcaaatggattggctatttgaatgctgaagccgctactgtggctaataatcaaggtggcatatggcagagtgaaaacaagacgatccggatgaaaagtaagaactatacattgtggcaagatttgaatttttctaagaagaaagcttcaagtggcaattatatgaacaaaaatatcaaagtcaccggaaaatatcagcattataacggtgcgacctattactcattgtatttaaacaatacatggatcggctatatcaatgctacaagtgtcacaaatgctcatgtaatccattcgcagagcaatattagccgttatgtgatcgtcaacaatgccagcgggaattttctgaatgctgctgatcctaacagcagcaaattaggaaaaaagagtaattataaagggtatatggcgaaagcaaccaaattagccaaaacgagtgatggcaattatctgtatctggtttcaccagcagggaaaatcgggtggctcaaagagaatcagacgtatagcgtgaatgataaattctggatgtacactactggtggcaagtacccctcgctaaatgtcaaaaatttaaacattcatgtgtccatcagtaagcagcgagtttacattaagtcaggcgacaaagtcatttataccatgctttgttccacggggacagtttttacgccgacaccgttaggtaattttagaattcagcaggagaaaggctccgccttttcaggagcggcttattaccgttctttcaaagatcatggtgtctatctattccataccgttccaacaagcattgcttggtcaaccaattcatttagttcggtggaaggcaaaaaaataggacagcgagcttctcatggctgtattcgattagcagtccctgatgctaaatggttctattacaacatgccttacaacactcccgtaaaaatcgttaactgattctagctgctgcatcctttgaataaggatgcagcagtttttttgtagcgaaaagagttgttgatttgcacttcactaattagagttgaaagtttttatcttctgaatagagatcaaggcctttttgatattttactttttgatattttgatagaagttagatttgtaaagtgggtcaattgactaaaaactgccctttgaaagctgtgtcgcccatttgggaaaaggatttctcttttgaatgactgacatgtccgttcgaagcttgatagggagcatcaatctcgaatccctagttgctaactaaggtaagtataaagcggtcaactaagtgtaaatagttctgaaatacgccgatagataatcagaaaactacccaaatccgggagaaaattgcttacaaaaagagattgacacttattatatcattcgataatatatcagtaagtgatatagtttcctaggatgggggaaaacacatggatgaaccattgaccgattcaacttatttgattttgttagctttattaaagccaaaacatggctatgtgatcatgaagcaaatcaatgaattaagccaaggtacctatgaaatcggtccggcaacaatgtatactatattgaaaaaattgaccaaaaatgaaatgatcagtttagaagagacgacagatcgtaaaaaaatctatcagatcacagccaaaggaaaaacggctttagaaaaggacattcagcgacgaaaacatttctttgagattggtgaacagattatgggtgagttggggggactggcagatgagcaaacgtaagacaaaacatttgtattcattaggtgttgcctattatccagaaaaagaaatgatgcggctgcaagagcaagcagcaaaaggttggcagtttgtgcatatgaatcagttcggttttttgaagtttattcaaagccaaccacaagagaagaagtttgctgtcgatttttttcaaggagacaaatctgatgttgatgaatacttggcaatgtatgaagccggcggatgggagtatattagttcctacaaaaaccgttactactattttcaggctcctttagagacaccagctatttttagtgatcagcaaagctatcaagaacgaatcgatagtgaggcacgctatcttatgaaacgttcttttggcataacaggtgttggcttggttattctgcttttgatttatctcctcgctcgctggctagtacttacctataatgagatactaggtttctcatatggtgttgcagttgggctgatttgtgcgcctcttgtcatcggtgtggtgtcatttctcatgcgtcgcttgtacaagaaccgcgcctctttttacaaagaaccagagaaactagctaagcggcaacacgtgttacgggatacgctgctctttatgggagtcggcgcattaattggaagaattatcggctttttagccggttatttatactaacttaaaagacaaggaaggtgaaattgtgttagaagcaaagaatttagtgaaaacatttggggactatcgggcagtggatcaattgtcctttcaaatcaacgatggcgagatcatggggctgatcggtcaaaatggtgctggtaaaaccacgacattccgattgattctagatttcttacgggctgaacaaggagaagtactatggaatggccatcaaatcacagaaaaggaatacaatttgattggttatttgccagaagaacggggactttaccctaaagtaaccatccaagatcaactgatttattttgcacgcttgcgtggaaaaaagaaagaagaaattgaacctaagatcgacgaatggatggaaaaattccaagtaaaagggaaaaagacagataaagttaaatcattatcgaagggaaatcagcaaaaagtccaattgatcgcaacattgattcatgaacctaaattagtcattttggatgaaccatttagcggattggaccctgtcaatgctgagttgctgaaagatggcattattgaactaaaagaaaaagggtcttgtgtcattttttctagtcataacatggataatgttgagaaaatctgcgatcatttgatcatgctaagagatggtcaaacggttctcaacggaaaagttcatgagatccgtgaatcgtttgggcggacgaaagtcttcttggaatcttcattgtcaaaagaaaccatcctagcagttgaaggtgtcgaaaaagttcttcataaagaagatgggagttatgacattacattatcgcatcctgaagtcggtcgcacattgtttgatttggccacagctgatggctatatcccgatgtttaaccaacaaccgccgacattagaagaaatctttaagagaaaggcgggaaaagacaatgagtaaattttgggtgatcgcgctcgatgtgtttaagaaaaacgtgaaatcgatctcgtttttgatcatgatattgattccatttattgcattgggcattatttatgtggtaggaatttttaccgatggaatgaacagtgccgataaaattgctgtttatgcgaatgaaccagctattgcacaaacaatcgcagctcagaaaaatgaagactatcaatttgaagtggtggattctgaagaagctggaaaaaaacaattagcggatgaaaaggtcgatgcattcttgatcgttacttcagaggccgacagtatcaaaggtgaattattgagtgaatcttctatgggacaaaccacagagttgacggttcagcaattattgtctgggttgcaagcctcgggacgtgccgcagcactcggattaaatcaggagcaagtggctagtttaagtgagccagcaaacttcagtaaacaaaaagtttctttcaccgaagatggcaaaatggagcttggggaagacaatagttcgatccaatacattgtgagttacgtcggaacaattattttattcatgtttattttgacttacgctcaaatcattgcccaagagattgcttccgaaaaagggacccggatcatggaagttattttgtccagtacgagagcacaggttcacttttatgccaaattaaccggtgtaattatggtcgcattagctcagttattggcttacgccggtatctttgctatcagttattattggatcaaagacatttcaatggtcaaagatgtattagccaatttctcaattgatggattattcggtccattcttgatttactcggtcatctttgtcctattaggaattttgatttactctgtcctgtctgctttgtgcggttcattagtcaataaagcagaggacactgccaaggcgatcattcctgtcacttacctttctttagccggttatatgttaggtttgattctaggcggtacagatcctaacaatatcattttgcgggtcacttcttatatcccgtttttatcttcatttatcatgccagtccgattggctaacgatacagtaggtatcggaggcgcggcagtctctgtagccatcttagcagtaagtacattggcattgatgctgatctcagcaagaatgtataagtcaaacgtactgatttataacgataacggcattttggcttcattgaaacaatctttcgttttgatgaagaatgaaaaatgaccagccaacaaattctccgattagttaggcttcaataaagaaaccgatgaaaagcttgtgctttctgattaccaaatggtatccagaaaaccctctgcttttcatcggtttttttctacgtagaattaggtaaagtagctttaatgagtcaagaccgccaattgatcaagctagtatccaatcagcctttaattactaactattaaagctaaacgagtcatttaaactactagtttcaaatataaccaagtcttttttcaatcaggcattgcctctgctagcgaaatctttgttggcataatgtcaaaactgatgaacaaagtagtcgaaaatttgctgttctgaagcaatttcttgtgcggttaattcaggatgccattggatccctaaaatcggcgccgcaaaggcagaagtttcaatggcttctacgataccgtcaggggcagttgcgatcacttggaaatcttttgcaacatctttaatggcttgatggtgaaatgaattcacttgataggtggttcctaataattttcctaaacgactgtcagcaacgatctcaacggcatgagtaggaaagcgaaagggtgtcggtgcttgcacatgcttgatggttggttgctcgaccaatgacaagtcttgatagaggttgccgccgaaagcaacattcaatagctgcatgccacgacagacaccaaaaattggtttttcttgtgcgacagcttctttgatcaacgccaattcaaatgcgtctcgttcaggatgtgtaccttggatcagtggatgcatctcttcgccataatagcgaggagtcacatcatgaccccctgccaaaagtaatttatcaatctgggcaacatattgggcggcattttcgggagctcccatgggtaaaataaggggaaggccagaggcttgttgaatctgtgtcacaaaatttctcggggtatatgtaatccaatgggcttccccatcaatcatcgttcgttcgttgccagcaattccaatcactggtttcataagcattctccttccagctgttttgacagcagtaatgaataaaaaactgtgacaaaaggaaaacaaaggaagctatccgaactgactttttccacgaaattgcgaggacctactagagagtagatgcaatttcgttatcgttcggatgctccatttgttgctgcacttaagtcacagtacttttttatttttcgcgaatcacttctattttgtagccatctgggtctttcacgaaatagtaagaaggagaagtaccaggcaagccttttaagtcagtaacatcaaaaccagctgctttatgctgctcgtgaagtttctctaaatcatcggtactgatcgcgatatgaccatagccgtcacctagatcatagccgggatgatcatagttataagttaattctaattcataatcatctcctggtaatgtcaggtaaaccaacgtaaatttgttttctggaaaatcacgacggcgcgattcttcaaaaccgaatgcttcttgataaaatgcaagtgatgcttcaagatctttcactcgcacacaagtatgtgccattttcatttgtcattcatcctttcaattgtggtaagcctataataacataacccgattttttgtggtaagaaaagtgcaccccgtcaagttgcagcttgtcgccagtggcttcctaaggtagaatggaaagaaagagatgatggagggaaacatggggaacaaggagaaagtgtttgggcaaaaagagccgggggctgactatatttcacgattcggtgcctatgtcgtgattccgaatgaacaccaacaagtgattttggtccaagcgccaaatggcgccttttttttaccaggaggggagattgaacccggtgaatcgaaggaagaaacgatcaaacgggaattggtcgaagaagtaggatttgcaggaaagatcgccagttatttaggggaggcggttgattatttttactcgcgacatcgagaaacgtattaccatcatccggcctatttttatttgatgactgattggcaaaaaataggtgagccaacagaacaacacaaccaactttcgtggcatacaccagaagaagccattcatttattgaaacgcggcagtcatgcctgggcagtgaaacaatgggtaaatcaaaaagacaacgatcatgcataaaggcagtgatcgttgtcttttttactcttttattttagttcatttaacacatagtcattgataactttagctacaccatcttcttcattggaagcagtgatgacgtcggccgcttgtttgacattttctgttgcattagccattgcaacgccaagacccgcatattcgaccatcgttagatcattttcgttatcaccaatcgccatgacttctgcttgtgagatacctagttcctcagctagcttctgaaccgcagcccctttatgagctttcttattcaagacttctaagaaaaatggcgcacttttgacgatattgaaacgctcagtcaatgaagttggcaattgtggaataatagcatcgatcaattcaggctcatcgatcatcatcattttgatgatattcagatccgcagtcatttcttccggtgtacgatatttcaaaggcatattgaccaaaaaggcttcatagacggtataaggactgatgtctcgattcgctgtgtacatcgtatcttgggtttccacatgcaaatgaacccctaatttacgggcagtcatttctacttctaagtattcttcatgcgtcaatccgaattcagaaacgatttcttttgttttagtcttctgtacgagagaaccattatatgtgattacgtagtccgtttctgaaaacaagtctagttcacttaataaatcttggacacctgttaaggggcggccagtacataagacgattcgaacaccctgtgcctccgcagcttttagtgcttggtacactccaggtgtgatttttcgatcattgttcagtaacgtgccatcgatatcgatagcaatcagtttgatgctcataacttcctcctagttgttcgtattgatcaaggcaccattgcgaatatgtttcgcaaactcttgatacgtatcccaaaataaatcatagtgattttgtagtgcggggtcaatcatttcttttgggaaataaaagcgctggtctccttgtgtttgaccagcaagtgcagctactagttgactagccttggataattccactagggagccgtctttttcttgcagttcgatttgtgtccgatgcatgccggaagttgggcgataaaagtcataaggtaaatcgaaactagaattgattgctgtgtaatagtcggggttaaaaccgactttttcgacaagagattgcagttcatgaatcaatggcaattgagtgtcttcttcaaaacgtgcagacttcagcggtttgcggttcaagaatcgtttggctaaatcactaagaatcggatcattttcttccgtccactgagtgaagtaagtattcaagacgccatcgtctagttttaggtattcttccaaagtaaagtgctgtttaagaaagggcagcaaaagctgggaatgcgattggaaaatttcttcatgttcttgatacaattcggcagcgcgatttagtaaatgtgccaagataacttccattccccgagaactggcatggaaatagacttggacatacatttgatagcggctgacaatataatcttctaccgcatgcatgccactcatagaaaatgcgatcccgccagcatagggacgaatgactcgcagaatacgtgtcaaatcaaatgtgccgtattccgttcccgtgaagtatgcatcccgcagtaaataatccatgcgatccgcatcgatctgactggaaatcatttgcaccacttgtgggtttgggtatgtcttagtaataacactggccactttttcaggaaaaccttcttccacacgattgaggatttgatagacttctgtttctggagaagtaatgatcgctacagtgatggcttcgtgatcggtatgaaaaatatgttcaaaagtgtgagaataagggccatggccaacatcatgcaacaaagcagcacaaagcgtgaccaatcgttcccggtcatcccagccatcagacccaactttttcaactgggaaatttcgttgaaacaaatcacagatgcggcggctaatttcgtaaacccctaacgaatgtgagaagcgactatgttcagcaccatgaaaagtaaacgaagaagttcctagttgtttgattcttcgcaggcgctgtacttctttcgaattgatcaagtccaagatcacttgatgctgcacatgcacatagttgtgtacaggatcacggaatactttttcaatagcaagtgtttgatacttatatgggatgctcattgtgaactctcctttatcggttgatttcgttgatacatattggtcatacgagcctctagtaatgccgcttgatcatttttttcaacccattcggatgcagtcacagggctgagagaggacttagttagccgcatcaaggcctcttgcagtcgtgaggcagcttctgatacagagaaagaacgctgaagcacatcttggagtgttgtcatactggtaggttcaacggcgggatagccattagtaccaaactgctctttcaagcttctttgataaaacgttcttactacttctcctcgatagtgttggtcgccgttgacactaaggtacatcatgactgcaattcctgctttgatcctgcgctgggcagtccctgcgattttctttccgtccatactcaagtcaaaggtaccgggacaataagagtttgggatttcataggccgcaatttctttttcgggaaatgcttctcgcatcaagtcgaccattcgctgataagccgcatctgtagtagcagctaacgtttttgggaaaatccacgatacattcagaacaccggcatcgttgatgaccccaagcccgcctgagttgcggatgattggttgaaagccagcagtcgtcaaagcggatattccttcggtgaaataaggcactcgggtatctttcattcctaaaatcatagtatcaggcaactgccaaaagtgtaaaaattcctgatgatgaacgcctgcatattcactcaatacatcggtcaatgcaaacggtaaaaaacgattctcggtagtttggggatcaaatggcaacatttgatcaatcatttcaatggtcacggtaggcttagattctccttcaataataagatctcctactattatatatgaagatcatgaaaaaacttaatcaaaaagctaagaaaacgttctatagtggatgttttagctgaaatgattgacaaaagaggggaaaaaaggaaaaatgaaactgaaatctgctaaggaggcacactatcatgagggaattgtcacaaggaattccgatttcgatccatttaacgacaaaggtcgaacaagcgggagaaacacaagattttttgtttgatttacaaggacaggcggtcaaaatcggcgatacgctgtatctgagatacaaagagattcagccagaaggagccgaagtaccagtgacgatgaaaattatgccagatggcgtgatccaactgattcgctcgggagaaatgcgaacacgcttgaaattcgcttacaaagaacgtttagaaacaagttatcaaacgccttacggcacgatgcatttccatacatatacaagtcacttacatgtgagtctgaaagatcgtccttattcaggtaaagtcgatgtccattatgatttatttatgatggaagacaaagtgggagaatacaaactttctttggagtttactgcttaaataaatgcaaattttgaaagaataaattgcaatttgtctcacatttttgtatgattaggagtagactgtgaaaggacgtgtcccgtttggaaattaatgtatttgaaggtgtaaataaaaacgaattgtcaatgatcgaagttgcccatgcgattttagagcaacgcggtgacgtgatggatttttctgatttggtcaaccaaatccaaaactatctagaaacttcggacagcgagattcgtgattctttggcgcagttttatacagacttgaatatcgatggcagttttatttctttgggagacaatcgctggggattgcgttcatggtatgcgatcgactcaatcgatgaagaagtcaaccacggaatcgatgatgaagatgaagatacaccgcgtcgtcgcaaacgtaagaaagtgaatgcctttattagtgacgatgaagacgcgatcgattataacgatgatgacccagaggatactgatttgtctgatgacgatgaagaggatctttttgacgatgatgacgatgaggatgaagaaatctccgcatataactcagatctgcaagaaattggtgcagacaataacgatgatgacgaagaggaactaccagggaacattgaagaagatctaacgatcatcgatgatgatgaagaagacgaatttgatgacgaggaagaagaggaataggcctcttcttttttgtgtttagcaaaggcaacagcgtatggaagatggcaagagctcaatcaaaataaaaaaccacggaagtgctgtcagcacttccgtggttttttgaattatcccttgagataaagtatactataaatgaaatgaaaaacgcgccttgagggaatcgaacccccgtctcaagaaccggaatcttacgtgatatccactacactaaaggcgcgaagcacaaataacagtttaaccaattttctcagaaaaaacaagaggtaaaatgatgaaatttcaacaacaattttcgcaacaacaaaaacagacacaaaagttggcgatgacgcagaaattacagcagtcgatccaagtgctgcaattttcatcagatgaactgcttgctttcgtagataatcaggcattagagaatcccctgatcgatttaacggaccatgaatatccgacgagttatactcaaggcagtgggacatctgagcaattcaatgaatatttgaatcagatcccaaatagaggaagttcgctctttgagtatttgatcgatcaaatccatttaaattaccgagacacctttctacgcaccgtcgtgttatttctagtggaatatattgatttgaatggatttttgaccattgatttggtgaaggctggtcaaatgatcggagcttcagagattcagatgctcgatgccttgacactgattcagcagttggatccagcgggtgtcggcgcacgagatctacgagaatgcctcatgcttcagactgaacgggacgatgctgcgccagaactcgcctatatcgttcttgaagaatggttcacggaattagcagagcgcaagtgggacaaaatagcgaaaaatctagcagtttcgctttcagaaattcagaaggtgtttgactatatccaaacgttgactccaacaccaggggcggcctttgggtctacagatggtttgtatatcatcccagatttgcgagttacgattactgaaggccagccagcggttacctctaatcgacgagcaatgccggaagtccgtttccaacaacactattttgatcaattaaaacaaagtggcgatgctgaggtaaagaaatatttagacaacaaagcccaagaatttgaatggctaaaaaagactctccagcagcgaggagataccatctatcgagtgggagaagcgatcgttcatcatcagcaagacttttttttacaagctgaccgaccattgaagccattaatcctcaaagaaatcgctgacgaattaggtattcacgaatcgacagtcagtcgtgccgtcaatgggaaatatttggagacagaatttggtgtttttgaactgaagtccttctttggtcaaaaagtgtccacccaaagtggagaggatgtcaccacggaggcaatcaagcgacgtttggcagctttgatcaacgaagagaataagcagaagccgctttctgatcaaaaattggctgatttgttaaaagcggaagaagtggaaatttctcgacggactgttgccaagtatcgtgaggctcttaatattcctggatcttctaaacgaaagcggtttgattgatttttcgatacagttcttgttctgatccagctattgaagaaagattcaacaagaatgacggcaaaaagtccaatgaccccacctcttatacataagaagacaggtaagcaatttgggtttcatataaccgtagcaaaggcagggctacttgtgataaatagctctgcccgcttttcataggcggtcgctgatccttttgctcgagtttttctttgttgatttcttttactagtttgaaagctatttttggctgtgataagaatccgctttacggttaaaaaagtttggagaatcattttttataattgaaatagttgcatgaggcgtccagaagtgctactattattggtgtaagagatgaattaaattttttttggaatagatgggtcattttaagtcattgtaggacaaaaaaagtccaacgggaggatgcaaaatgctcgatgaattgaaattgattgaggcaatcaccccggatatcctcgcggtgcttcaagaacgttaccgtattttacggactatctattggatgcaaccagtagggcggcggacattgtctgaaagcttagcaatgacggaacgtgtgttgaggtctgaaacggatatcctcaaaaaacttaaattgattgattcgtctaaaagcggtatgcaattaacggcctatggcgaagaaatctatacaaaaatcggcagtttgatggatcaattgtttggcatgcatcaaacagagaagcggttatccgagtacttcgggattgatcgttgcttgattgccagcggtgatggggaccgtcaaccgaaagtgattgctgaattcggtcagctgcttaatgagtcgttagacttattgctgccagatggtgagaatacgatcgctgtgatgggcggtacgacaatggcaaaagttgccgaagaactaggcaatcttgaaactggcaaacgccataacttgtttgtcccagccagagggggcatcggagaagcagtcaatgttcaggcaaattcagtcggatcagtgatggcgatgcgtaccaatggtaattatcgttccctatttgtaccggaacaattaagcactaacacctatgaatttttgttgaaagaaccagcgatccttgatgtcttaaacttgataagtcaagcaaattgtgttattcatagtattggacgagcactgcatatggcagctcgaagaaagatgtcagaaaaagagatcctgatgctgaaacaaaagaatgcagtagcggaatccttcggttatttctttaatgaagcaggcgaggtcgtttataaaattcctcgtatcggactgcagttgaaggacttgcagaacgtgccgatcattttcgcaatcgcaggcggtaaatcaaaagccaaagcgatcaatgcatacatgaaaaatgcaccaaaacaaacatggctcatcacagatgaagcctgtgccaatgagattttaaaaggggcaaccctttaaaataaatatttttatgattttcataaggaggaaatcttaaatgacagttaaagtaggtattaatggatttggacgtatcggacgcttagcatttcgtcgtatccaagaagtagaaggaatcgaagttgtggctatcaacgacttaacagacgctaaaatgttagcacacttgttaaaatatgatacaacacaaggacgtttcaacggtacagttgaagttcatgaaggatcattcaacgtgaacggaaacgaaatcaaagttctagcaaaccgcaaccctgaagaattgccttggggcgaattaggtgttgaaatcgtgctagaatgtactggattcttcacttctaaatcagctgctgaaaaacatttaacagctggtgcaaaacgtgtagttatctcagctcctggcggaaacgatgtaccaacaatcgtttacaacacaaaccacgaaactttaacaggtgatgaaacagtaatttctggtgcttcatgtacaactaactgtttagctcctatggctaaaacattgaatgacaaatttggtgtgatcgaaggcttgatgactacgatccatgcttacacaggtgaccaaatgactctagacggaccacaccctaaaggtgacttccgccgtgcgcgtgctgctgcagcaaacatcgttcctaactcaactggtgctgctaaagctattggcttggtaattcctgaattgaacggtaaattagacggagctgctcaacgtgttcctgttgcaactggttcattaactgaattagttacagttcttgacaaagaagtaactgttgacgaagtaaacgcagcaatgaaagaagcttcaaacgaatcttacggttacaacacagacgaaatcgtttcttctgatatcgttggtatgacttacggttcactatttgatgcaactcaaacaaaagttatgactgttggcgacaaacaattagttaaaactgttgcttggtatgataacgaaatgtcatacactgcacaattagtacgtactttagaatacttcgctaaattataagatttgcgtcgtacattcatttaaaccatcgcaagagaaagcggggaagcagcgcgcttctccgctttttttaacaattacattaggaggaatctgttcatggctaaaatgacagttcaagatatcgatttaaaagataaaaaagttcttgtgcgtgtggatttcaatgttccattgaaagacggtgtgatcggtgacgacactcgtatcaaagcagcacttccaacaattaattacgtgatcgaaaatggcggaaaagcaattcttttctctcacttaggtcgtgtcaaagaagaagcagataaagaaggcaaatctttagcaccagtagcaaaacgtctaggcgaattgttaggcaaagaagtgactttcgttcctgaaacacgtggggaaaaattggaagcagcaatcaacaacatgaaagacggcgatgttgttgttttcgaaaacactcgttttgaagatgttgacggcaaaaaagaaagcaaaaacgatccagagcttggtaaatattgggcttcattaggggatgtttttgtcaatgatgcatttggtacagctcaccgtgcccatgcttcaaacgtcggaatcgcttctacaggaatcccaacagttgctggattcttaatggaaaaagaaatcaaatttattggtgaagcagtcgaagaaccaaaacgtccaatggtagcgattcttggtggtgcgaaagtatctgacaaaatcggtgtcattgaaaacttgattcctaaagcagacaagatcttgatcggtggcggaatgacttatacattctacaaagcaaaaggaatggaaattggtaactctcttgttgaagcggataaagttgagttggcaaaagaattgatcgaaaaagctggcgataaacttgttttaccagttgactcaatcacagctgctgaattttcaaatgatgttccaacagaagaacatactggtgatgttcctgaaggtcaaatgggcttagatatcggacctgaaacaattgcattgttcgctgaaacattaaaaggtgcaaaaacagttgtttggaacggaccaatgggtgtgttcgaaatgtcaaactttgctaatggtaccatcggtgtttgtgaagcaatcgcaaaccttgaagatgcaacaacaatcatcggtggtggagattcagctgcagctgcagaacaattaggttttgctgataaattcactcacatctcaacaggtggcggtgctagtttagaacttctagaaggtaaaactcttcctggattagcagcaatcaacgacaaataatcaagcaatgacgcggctgcgttgcaataagcagccgtgacccttaaataacaaaggagtgccagaaaaatgcgcaaaccaattattgccggaaactggaaaatgaataaaactgcgaaagaagcaaaagaatttgctgaagcagtcaaaacaaaaattcctagcaacgataaagtagattctgttatcggagcaccagcgttgttcttggaaacattagtaacagctgcagaaggtacagaattaaaaattgctgctcaaaacagctactgggaaaatgaaggtgcctttacaggagaaacttcaccagctgctttagctgacttaggtgttgactatgtaatcatcggtcactcagaacgccgtgaatatttccatgaaactgacgaagacatcaacaaaaaagcgaaagcaattttcgcaaatggtatgatcccaatcctatgttgtggtgaatctttagaaacttatgaagctggaaaaacagctgaatggatcgaaggacaaatcactgccggtttagaaggattgacagatggccaagtcagcaatctagtcattgcttacgaaccaatttgggcgatcggtacaggtaaatcagcagatgcacaaattgctgatgaaatctgtggtgttgtacgtcaaacagttgaaaaattatacggtaaagaagtttctgatgctgtacgtatccaatacggtggttctgtaaaacctgaaaatattgcagaatacatggcaaaagaaaatgtagatggagcattagttggcggcgcaagcttgcaagctgattcattcctagcattgttggatgcagtaaaataatttcattctcatgaaaatattgtttgcagaaaacagcttttttcactacaattaagatgttcgcaagggagattcccttaagataaaacaaactcaaaggagagacaaaacatgtcaattattactgatgtttacgcacgcgaagtcctagactcacgtggtaacccaactatcgaagtagaagtctacacagaatcaggtgctttcggccgtggaatggttccttcaggagcttcaacaggtgaacacgaagcagttgaattacgtgatggcgacaaagctcgttatggtggtaaaggtgtaacgaaagcagttgacaatgtaaataacgtcattgctgaagcaatcatcggctacgatgtacgtgaccaaatggctatcgataaagcaatgatcgctttagatggaactcctaacaaaggcaaattaggtgctaacgcaattcttggtgtttctattgccgttgctcgtgcagctgctgattatttagaagtacctttataccactacttaggcggattcaatacaaaagtattgccaacacctatgatgaacatcatcaacggcggatctcactcagatgctccgatcgctttccaagaattcatgatcttgcctgtaggcgcacctacattcaaagaaggtctacgttggggtgctgaagtattccatgcattgaaatcaatcttatctaaacgtggtttagaaacatcagtaggtgacgaaggtggtttcgctcctcgttttgaaggaactgaagatggtgttgaaacaatcttagaagctatcaaagctgctggtttagaaccaggtaaagacgtttacctaggatttgactgtgcttcttctgaattctacgaaaatggcgtgtacgactacacgaaatttgaaggcgaaaacggtgtgaaacgtacagctgcagaacaagttgactacttggaagagttagttaacaaatacccaatcatcacaatcgaagatggtatggatgaaaacgactgggatggttggaaactattgactgaacgtctaggcgacaaagttcaattagttggtgacgacttgtttgttacaaacactgaaatccttgaaaaaggaatcaaaaacggtatcggtaactcaatcctaatcaaagtaaaccaaatcggtacattgactgaaacattcaatgcgatcgaaatggctaaagaagctggttatactgccgttgtttctcaccgttcaggtgaaacagaagattcaacaatctctgatatcgcagttgcaacaaatgctggccaaatcaaaactggttctctttcacgtactgaccgtattgctaaatacaaccaattactacgtatcgaagaccaacttggtgaagttgctgaatacaaaggcttgcaagctttttacaacttgaaaaacaaataatctttcgatgattacattgctctgaaagagcagcggttgatttaacaaccgctgtgatttcagagcttttttgctgtctggattaagtgatttgaatcaagacttatttttctcatggaacagagagcagtcttttcttctttattttctttttctaaaaaaagaaattatagttctggtttagcgaaactctataataaaagaaaaaataaatttaggagaaatacatggtgtatgattatctaatcgttggtacaggactatttggctcggtttttgcttatgaagcagctaaacggggacactcggtgaaaatgttggaaaaacgagcacatattggtggcaactgttatacagaaaaacaagtcggaattgacatacataaatatggtgcgcatatctttcacacatcgagcaaaaaaatttgggactacgtcaatcagtttgctgatttttatccctatattcatgaacctattgcaaactataaaggtgagctatataatctccccttcaatatgaacacgttttaccaattatggggaaccaaaagaccagatgaagctcgcatcaaactaatggctcaaattgaaaagacaggaataaaaagaccccgaaatttagaagaacaagctctttctttggtggggacagatatttatcataagctgatcaaaggctatacggaaaaacagtggggacgaggatgtgctcagctaccttcttttattattaaaagactgccggtccggtatacatttaacaacaattattttacggatacttttcaaggcattccaaaattgggctatacagaaatgattcaaaaaatgctttcaaatccactgattgaagtttctttagaaactgatttttttgcagaccgtacgcgtcatgaagcatcaaccaagaagattgtttatactggaatgattgaccaatattttgactattgttacggggagttggcctatcgttctttacattttgaaactggaacatatgatacagataattatcaaggaacagcagttatgaactttacagacagtcaaacgccctatacgcgaatcattgagcataaacatttttgtccagttgtgacaaaaaaaacagttgtcacgaaagaatttccaaaaacttggcggaagggagacattccttactacccaattaacgatcaaatcaatcatgctctgtatcgcaagtatgaaaaattagcgcatcagcaaaaaaaatgtttatttggtgggcgtctagcaaactatcgttattatgatatggatgatacgattgcagccgctttaaaactagtcaaacatgaatttcaagcagagtgacttcttttatggaagaggttgctctttttttgtcccgattctgggacaaaacgtaacttttttactagttatgaaataatgaattgtcctatcttttaaaaataggactaggggaagcttataaaaatagttttatgaaaggggagaaaaataaacgtaatgagtaaaaagaataattatcgaaagttgctacgctccaataagagtgaacgctacaagatgtataaaagcggaaaacattgggtctatgcaacgatcacttcttttactggcattgctggattgagtatcacaccaatcgtggcgcatgcttcagaaatcacaccgcctttagatgcaagcaaagaagcaaatgccgagaacgtcttggcaaataaaacgaatgccaaaattcctgcttcatcgacgcaagaaagtgaggctacttcacaatctgaaagcatgcgtccatcggaaagtttttctgaatccgaaagcaacacccagtcacaaagtgcgacagagtcaacgagtgtaacagaatcacagagtatgagtgattcagaaactgaaaacaatgctaccagtatcgaggcatctcaaagtgtttctgaatcaatgagtctttcggaagagaagagcggatctgaatcagaaagtttgagtatctctgaaagcgcctcgatttctgaaagtggctcattgtcgtcaagtgcctcagaatcgacaagtctatcgttgtcacaatcgacaagtggctctcattcaacttcagtaagtcaaaagaaccaaccaaaacaaactgtttccgaaaaaaataaagtggagtcacaaaaagcacaagatctcttcgatcaattagtacccaagaaagtacaagcgtcggttgacaccacgacgaatgcattagaaattgttgtcaaagatggcaaatcaccaagcacatctttgattcgggcagcacaacaatatgctagtgccaataatttgattgctagttttgccatcaccacccaatcagggcagattgttaaaatcaatgtttctgcggatccagatatgggccgagaagaatttgagcaggcaatcaacgatggtaacaaaaccaattcaccttctggggtgacggttgatgttccggaccaagtgaaaaataaggaattatacaagcaaacagctattgctaatggcacttatgcagcagtgaatgactgggctacgctgaaagcagcatatggaaatgcttcgattacctatattgaggtaaccgctaatattacggcagctaccaatgtggctacccgtgatttaggatggcgggcaacgagtgtgattattgacggtaatgggtttacagtcaatatggcaggagcagcatttaatgtagggacaagttctacagttcgcggttctatctttacgatcacagatgtgaatttgattcattggcaatcaggtaccaactcaggagacagtggcacaggtaatgcagatggagtgatcgattcacgatcagcaaccggaggttatgggtactggtacttcaatatcaataatgtgactctcgaaggccgagatggtgttagcgggacagatacctcataccaaccacgacgattgctggatgcagaggacagtcacgttactttatcaggtaaagtcatcgcaaatgtcaaacaagaattgatgcaaattggtgaagtagcaatcgctaacggagcccatgtagagttgaatcggacagctggtactaccggctactccatgttttactatatggcaatccgtggcaataatgcgagtgatacaggattcaatcacacctttaaagtgggcgatggcgcgacaattattggaaacgagctaagtacctataacagcaacaactatccccttgtctattatggatttaactcaattactgtcggagatgacgtaacttggaaacaagacggtttccaaatgctactcgatttttctcgttactcgggaagtcaatcaaatgaccgaaccgcaacttttggtcaaaatctgcaaatgacggcaactcgtacagtaggttccaactcgctaaacgtcacgaatagagcggttgttacatttaatgcaggaacggtacttgatctgcaacaatggaatgccaacactgttgtgaacgtggcttccggtgcaacagttcgctttatttcaccgcgggcattgcacttagcccgtctaacttcttcaggagctgtttcggcaggtcgattgattaccggttcgggaacatttgtcatgaataattctcagatcagtacatggcaaggcagcagtagccaaaccgctgctccagaaggcaaccgtaacttaaaattcgtggaaatgactatttcaggttcgacaacaactattaaagatacggctggaaatgttactacatctaacattgtagacacttctacccgtgaattagcgactgttgcgattgcgccaggaaccgtaaccgtaaattatgttgatcagtacggcaatattattaaaactgttgatatgccaattgatccagacgttaattacattggtgagtatcttgatttgcaaacattggagtatgccaatgagttaatgcctgaaaattatatgtgggcaatcggtacccaagttgctagttcagctaaaaatgatggtcaaagcggcggagatagtacgactaatgccgataatggggacagctatgggcaagcgacggttgcgattgttccaatggagaacacaaattatacttataatatttatgtatatggtgttgccaatcattcggttcagtaccaatatgtcgacgttaagactggtcaagtaatctcttctgagtatatgaatgctggtaccgaagcttccggaacagatagaattcctgcaaactacgggaatgttatcgattggacaaatagttactatacttcgactaatttgccaccaggttactattatgcaacaggtgccgtattgaatggcaatgtacagcctggatctactacagttggaactgaagcgagtctgacaaccatttacgttgcagcagacacacaaactgtcaatgtaacttttgttaattcagatggccgtccattacaaaaccaagttggcacagttgctatcaatgggacgactggtcaagaactaagctattctgacttaatcgcagattacctaactcaagctggttattatgcagatcaaactggaacatttgtttttgatagtactagtaataatggcagtacaacagacagtgatcaacaatttattacgatcactctttatccatcctatcaagaagtcggtgtcgttggtaataatcaacctgaatcagatcctgctacaggggaagcatttgagcaaatcccaggaactgtcactgttggaaaatatggtacttccggtgtttcaaatgaaagtttcactcttggggtgacagatgcagatttagagagaaatgggtatatctatacggttacaggaccagatggagtagtctacaatacattagcggaagctatggctgccaatcaaacttttgatactaccagcaatggagcatctcaaacggattcttcgccacagatgtttacggtcaattatgaacaagacccggtatcattgtctacgtccgagtctatttcgggaagcgaatcattatcagaatccattgttacttctacttctgagtcagaaagtgtttctctttctcaatcaatttcagaaagtgactcattatcagaatcgatctctgttagtgattcagaatcaatttctacatcaattagtgcgtctgtttcagtatcagattcagagagcaactcagtgtcattgtctatttcagaaagtgaatctgacatgaatgactcgacttctgaatcattgtcaacatcaatctctacttcaacttctttaagtgattcagaatcggtttcgatttcattgagtgactcagagtcaacgtctctttctatcagtgaatctgtttcggtatcagactcagaaagtggttcgttatctacatctatttcagaaagcgaatcaatgtctctatcaatttctattagtgattcagaatcgttgtcagaatccctatctgaaagtatttcaacatctatttcattatcggatagtgattcaatgtcagaaagcctttcggcatcagaatcgttatctatatcagctagtgtatcagagtctgattcggaaagtgatagttccagcttaagtgcgtctgtttctggatcattgagcaacagtacaagtgattctgaaagtttatctttatcagagtcagtatcagtttcactctcggaatcactaagtgaatccacgtcactatctctgtcagaaagtgactcagtatcagaaagtatttcagcatcagaatcattatctgtcgctatcagtgaatcggattcttcttccctcagtgaaagcattagtttgagtgaatctatttctgattcgttgagtgcaagcatgagtttatccgaaagcttatcggagtcagaatcgatctcaaattcaattagtacgtcgatgtcattgagcattagcgatagtaatagtgagtctagtagtgaatcagccagctatagcggcagtacgagtgtaagtaatagcgattcaacaagtgaaagtatttctgcaagtaattcactatcagtaagtatcagtgagtcaaccagtttgagcacatcaatcagtgattcatcctcattgagtacaagcatttctaactcactaagtgcgagcgaatctgcaagttacagcagtagtacgagcgtaagtaacagtgattcgacaagtgtgagtacgtcagttagcgaatcaacatctacaagtatcagtgactcaatcagtgccagcatatcaactagtgattctttatcggtaagtattagtgattcaacgagcttgagtacctcacttagtgattcatcctcagtgagtgtcagcgtttcgacatcactaagtgcaagtgaatcaacaagttacagcggcagtacgagtgtaagtaatagcgattcaacaagtgaaagtatttctgcaagcaattcactatcagtaagtatcagtgagtcaaccagcttgagcacctcacttagtgattcattgtcattgagtacaagtatttccgcctcactaagtgcgagtgattctgcaagttacagtggcagcactagcgtaagtatcagcgagtcagcaagcttgagcacatcaatcagtgattcatcatcattgagcacaagtatttctgcatcattaagcgcgagcgattctgcaagttacagcggtagtacgagcgtaagcaacagtgattcgacaagtgcaagtacgtcagctagtgagtcaacatctgcaagtattagtgactcaacaagcataagtacgtcgatcagtgactctatgtcattgagtacaagtatttccacatcactaagtgcgagcgattctgcaagttacagcggtagtacgagcgtaagtaacagtgactcgacaagtacaagtacatcaatcagcgattcgttgtctctgagcacaagcatttctgcatcactaagtgcgagcgattccgcaagcttcagtggtagcacaagtgtaagtaacagtgagtcaacaagtacaagcacttcgatcagtgattcattatcagtaagcacaagtatcagtaatagtgaatccgcaagtgcaagtacgtcaatcagtgattcatcctcattgagtacaagtatttcggcatcactaagtgcgagtgattctgcaagttacagcggtagtacgagcgtaagtaacagtgagtcaacaagtacaagcacttcgatcagtgattcattatcagtaagcacaagtatcagtaatagtgaatccgcaagtgcaagtacgtcgatcagtgattcatcctcattgagtacaagtatttcggcatcattaagcgcgagtgattctgtaagttacagcggtagtacgagcgtaagtaacagtgagtcgacaagcgaaagtacgtcagtcagtgattcattgtcagtaagcacaagtatttccgcatcattaagtgcgagtgattctacaagctacagtggtagtacgagcgtaagtaatagcgagtccacaagcgaaagcacgtcactaagtgattcttcgtcgctaagtacaagcgtaagcaacagtgaatcaacaagtacaagtacgtcgatcagtgattcattatctgtaagtacaagtattagtaacagtgaatcagcaagtgtgagcacatcaatcagtgactccatgtcattgagcacaagtatttccgcatcgttaagtgcgagtgattctgcaagttacagtggcagcacaagcgtaagtaacagtgactcgacaagtacaagtacgtcgatcagtgattcattatctgtaagtacaagtattagtaacagcgaatcagcaagtgtgagcacatcaatcagtgactccatgtcattgagcacaagtatttccgcatcgttaagtgcgagtgattctgcaagttacagcggcagcacaagtgtaagtaacagtgattcgacaagtgtgagtacgtcgatcagcgattcgctgtctctaagcatgagtatttccgcatcattaagtgcgagtgattctgcaagctacagcggcagcacaagtgtaagcagtagcgattcaacaagcgaaagtacgtcagtcagcgattcatcctcattgagtacaagtatttccgtatcacaaagtacgagtgattctgcaagctatagcggcagcacaagtgtaagtaacagtgactcgataagtacaagcacatcgctaagtgattcattatctgtaagcacaagtatcagtaacagcgaatcagcaagtgtgagcacatcaatcagtgattcatcctcattgagtactagtggtttggtttcacaaagtgcgagcgactctgcaagctacagcggtagtactagtgcaagtattagtgaatcaacaagtacaagtacgtcagttagcgattcgcgggctagtgaaagtcaaagttatagcagtagtacttcagccagcttgagcctgagcgcaagtgtcagcacttcagtcagtgattctgcttcaattagttcaagtatcagcaacagtgaatcgaatagtatgagtacgtcaatcagtgattcacgttctagtatgagtgaaagctatagcagcagtacttcggcaagtattagtcaaagtactagtgacagttctagctacagcagtagtacctcagcaagcattagtgcaagcactagtgatagtacaagtattagtaatagtgcttctgtaagtatgagcgaaagtttgagtatcagcacatcaataagtgactcgttgtcaatcagtgcaagcttgagcaatagcgatagtctttcagaaagtagatcatttgcaagtgaaagtcaaagctacagcagtagtacttctgcaagtctgagtctcagcacaagtactagtatttcattgagtgattcatcgtcaactagcatgagcaacagtaccagcttgagtactaacttgagtcaattgacaagcgactcgctttccgaagggattagcttaagtaatagtctaagtaatagtttcagtaatagtacttcagctagtacgagtttgagctcaagtacaagtctaagtgaacaactatctcaatcagtaagtgccagcgagtcacggagtgatagcgtcagctatagcagcagcacgtcaattagtacgagtgaaagcagcagtactagcttgagcgaattactatctcgttcagccagtgccagtgagtcgcggagcaatagcttaagtcaaagcacaagtacttcctttagcggaagcagcagtactagcttaagtttaagtgaaatgaactctcaatcaacaagtgctagtgagtcacggagtgatagtgtaagcaacagcatgagcacttcaatcagtgatagcttgagtgcaagtactagcttaagtgatttactatctagatcagagagtgcgagtgaatcgcgaagtgacagcctgagctatagcggcagcacatcgatcagtaacagcttaagtttaagcacgagccaaagtgatttagtatctagatctgaaagtgcaagcgaatcacgtagtttcagcacgagtgatagtgctagcacatcgatcagcaatagcgctagtgcaagtgacagcttaagtgatctatattcaagatcgaatagttctagcctttcaacaagtgacagtacaagtaccaatgattctgtctcagcaagtgctagtgaaagcactagcacctcacaatcaattagtacgagtctaagcgaatcggcatcaatcagtacgtcgcttagcgaaaaacaagaagtgattgagtctcaaagtgtgagtgcttcaacaagtgattcacaaagttcgagtataagtgaatcagttagcgtcagcatcagtactagcgaaagcgagcggaatagtacggtggtttcacctagcgaatcaacttcgattagtgaaagtattagtacgagtgaaagtttccgagattctgaatcggttagtgcaagtgacagtacaagtttgagtcaatcaatgagcactagcgaccaagtctctgcttctgagagtataagcgacagctccagcactcgtgattctgagtctgaaagcgcaagtatttctacggaagaaagccgcagtttcagtacaagtgagtcaatttctgcaagtgaaagcacatcgattagtcaaagcgaaagtgcaagtatgagtgaatcagccagtgaaagtacaagtacgagtgatagtgaacgtgattcaatgtcgaatagtgcaagtgtaagtgattcgaactcaacaagtgaaagtctaagtgtgagtgaatcagctagcgaaagcacaagcatcagtgatagtgaacgtgactcaatgtcaagcagtgctgagacaagtgaatctggctctacaagcgatagtacaagtgctagcaactctgctagtctgagtgaaagctttagtgcttctgatcgggactcagtctctatgagcgcaagcgaatcaatcagcgaaagtacaagcgttagtgaatctgcttcgttaagtacaagtacaagtgatgtcaactctgaaatcgtcagtgactatcatagtaatagtttgtctgaaagtctttcagaactacaatcgcaatcaactagtcaagatcattcactttcagaaagtgcatcaatcagcggatctacttcaactcctacaaattccgagcagaataatgcaacgaacggaaatacaggaacgtcacaaggcaacataggagtggggggacatgcgactggagccactcttcctaagactggtgaatctgatgcaagcggtagtcaaatgtctcttgctggaattgccgcgctgttagctgcgattgctttaatgaaaaagaaaaaagatgcagcaaagcgtgaaacggattaatcagttcctttcagtttatgaagggctgggataaatttcctagctcttctaaaatgatagaagtgttactactcaataaaaaagcgtcacagttagattttcctaactgtgacgcttttttattcgctatagccgattatggaaattcaacatcgaatgaaccgtcttctgtttttaccaactcggataataataaatttctgattgcttctagataaattgcttcacgcatttgagtgaaagaacggtgtgcctctacttgaaactcatagatgggacggtgttgtccccagtttcttccattgatgactgttttcaattgttgcaagttgtctgattgttcgatccaaagagtatccaacgcttttaaaagaacaattcgcttgaagaacagctgctggaaactgtctggcatgaattgctgaatgtgagtcaaacgatctgaaatcagagctaataagaattttttgacggttcgtttattaaatttatccagtttctcgatttcaaaaatatcaaaattatagtccaaattattaaagatgaaatcaaggatcgcttgtttatttagattctctttcttagtgatgaattgattgattgcttcttccatgcatttgttgaagattttttctaactcaactggcgtgcctgtcatgatactgttcctcatgctgtacattttgtctctttgaatggtgatgattgagtcaaattctagcgttgtttgacgtccagcaatttcttgatttttgcgattgctttgagactgattgatcaatttattgtattttttcttttttaatggcttgaaaccattggctgatttttcttgttcagttaatagttctcgttcctgggctgcccatttaggtgcactttcaacaacgattttatcctccatggatacataaaaaatgctatcaccagggcctccttgacgtccggagcgcccccgcagctgattatcgattcggtcactggtcattcgttcggttccaactactaacagaccgccgttttcccgcgcgtcttgttcaagtttaatgtctgtaccgcgtccagccattgaagtggctactgttacggccccttttttgcccgcttctgagatgatccaggattctttggtcgctgttgtagcatttaaaaggttatgaggaattcgatgctttaagagaatcagagagtataaagtcgacattgagaccgatcctgtttcaatcagaacgggacgttcttggatcaaagcattttttactgcttctaaagaagccatgatctttgactgattggtaacatatacgaggtcctgatgatcttttcggcgaatgggtttattcgttggaatttcgattacgtcaatattataagtttcacgaaattcgtcagcgtctgttttggctgtcccggtcattccggataaaatcttgaattttcggaagagattctgataggtaatggagcccatggatcggctttccgtggtgatctttaccccttctttggcttcgattgcttgatgaagcccagcttgtagttttgttccgatcaacttgcgcccatttgcttcgtcaagtaaaagaatttcattgtcttccacaacatagtctttgtttaagtgcaagagataattggcccgcaaggcaatgactaaatggcggtaaagatttttccatttttctgaaagaatgttttcgatacctaagtagtcttctgctttttgaatacctgtttctgtaaaccagacgtggcgcttattttcgctccttaggtagtctttcccttcaatcaggctctttacaaaccagtcagatagcgtaaaaaagttggactggactttgggagctcctgaaatgatcaatggtgtttgagccatatcgagtaatattgcatcgatttcatcaatcagtacataattgaagtgggtaacgtattgttcatctggagaaacggccaagttgtcaaacaagtagtcaaatcccaatgcgctatgggtagtatagacaatgtctgctgcatagacgacctctttgtcgacttcttctccttcatcttcatgttcggggactccagcagccacggttagtcctagaaaacgatagactttcccggtttcttcaatatcccgcaatgctaaataggtattggaagtaatcaaaaaatttcctttgcctcccagaccgtgtaagtacatcggcatggtggctgtcaatgtttttccttcaccggttttcatctcagcaacattgccataaaaaagagcaatcgcgccaagaatttggacaaaataaggttccattcctaagacacgacggtctgcttcgacaactacagcataggcttgtgggagtatactctctaacttttttcctagttcgagttgttgacgaaaaagaatagtttgcatttgtaattcttgatccgacaattgccgatacttgtctgcgagattttgaacctttctcgctaaccgcatatatttgcgaaattttttatctttcatttttgctgatccttccccaaaaaattgatagtgttagcagattaatttgtgttactggctaatttagcacgaatcattacgtcctctagttcaaaaagataatcccgcatcaaatcattggcttctaaaaaaaagacgatttttcccttcggagcagctagtttcatttttttggacgcaataagtggttccttgttttgatcaagcaacgcttcaccagaacttgttacgaagtgaagggaaaacgtataggttttggtggtgtccatattatagtagggaaattccccatgatagatggactcttgatcagctacctccaaagtatcttcagtccgtaaaacgacagctttcaagtctaatctaggactaggttcattgtcaggagtccttgattctgcagtctgtgtttcattattcgtcaaagtatctttcaaaaaaaagatacctcctaacagcaaaacaagaggtatgatgagttcaattagtttcttcatatgaaatccttctttttggggatgtttctacggaattttctccccttttttttccaatcctcgtcattctcagatgatcatctaaaaatgaagcgttgttttcttatttgaatttaaaacgatgataccacaatgactaacaccaccttttcattttttttttcgtttcaacaaaaaaacaaataaaaaagggggatttaaacttgctattattttgttaatccttacagatgaaaaaagtaagaaaaattggagatgaaaatgaagaatcaaaaagaactcattcgtaggatcatcgcgagtttcttcctgttgttcatcgttgagataggaaagcatattccgattcctttttttatttcagaaaagataccagaggaatcaactagcttgattctgaaattcttagcaacatcaaccggtggaaatttcactgttccaacgcttttttctttaggaatgggaccgtatatgactgctctgatcatctggacaacgatcagcatgattgatacagaaagtatcggaaatctttccacaaaaagaatcggctatattcaacgttgtttgactcttttatttgctgtccttcaaagttgcgcattagtgttaaaatttcgttcatcaatgatcgatcaaaaagctgttgggggatccgttgtcctgttgtttttaggagcagtccttattttgactgctggaggattgttcgttgcgtggctagccgatatcaatatcgacaaaggaatcggtggtcaaagcttgtttatcgttccaggtctattgatgaacatcccagctatgttaatttcgggacaaacagaatccgtccacttgagtcaaaattttatgattggtttggttatagtgactttaatctttatttatctaacgcttttcctttacagtgcagaataccgcatcaatattgaacggacaggtattgatagtcgcttcaacaattcgtatattcccattcgtcttttgcctgcaggagcgatgccgtttatgtttgcggtaaccgtcttttcaatgccgcagcttttactcttgaatgaaaagtggggagacacaggcttttcgaattttattacgacttacttttcatttaataatgtgcggggtgttttcacttatggtctgattctctatgttttaggttatggatttagttttattaacgttcgaccttacgatatagccaaaaatcttaaagagacaggagactatattttaaatattgcacctggtaaacagacggagatatatatattgaagcgattatctacggttgcattgcttggcaacagttatcttgtgatcatttcaatgattccgttattgattgggttgcaaaatcagatcatttccaacttagctttttattttggaagtatttttatgttgatcattattttagaaactatcacaaatgaaatacgcttcctcttttccagacgcacttaccggattttttagaggatgttaggaggtaattctttgaattattttattcccgattggacgaccagcagcggcaatttagaaagtgactacatgatgaatgtcattcagcttttcaagaacaatcgagaaccgtaccacttattgttattggaacatatcccgtttttgcgctataaaatgcatgcgtatgggttagaagcagctcagatgacttcgctttacgatcgcttgcaagatattcacaagatcaatgggtttcctttagatgtagatgacttgcctctttctcacaatgtggagaaagtctatacgccttttggtattacgttgatcaaggaagatcaaccatttggtaaaattcgtttcaatgcttttggctttgcggaacaaatgtatttaatgacggacccttaccgacaaattctcttcttcgatgatcgaggatttatttctgcaaaatcattgcagacagacaatggggaacaagtaaagaggatttactataacgaatcgggaatggaaaaatgtgtggaatactttggagaaaatccgcatgttgagctgattgattctcaaagaattggactaaagaaaagtcagtatcgaagtatggaggatcttctcttagaaatgatgaatcaatttcaatggaatagtgaatccgaagatcaactgatctgtttgacaaatgagcggaatctgcgattggtcaaaacgaatgagcaacgaaagcgagtgattcagatcgtttctgatgctcaccaactttcaaagtgtgcaccagaggaaaaagcagaattgtgggcagccgaaaataaaattattactgattccactagtaatcaaacagcgctcttgtctttaatgagacattccggtgtcaatgacccatctcgtatacagcgcatacctatttacacaacttctttccatctaggcaatagcaactccattccgcagctggttctttattggaacgccggtgagcttaatgaagacgttctgagaatccatcacttattgctgcaaaaagtcattcaaaatgatcgttatgacttaattatcgaaacgacgacattccaaagcgaagtcgttttacgtgaagcacaaaaagaaatggttgatactcactttggtgtcgatagtgaatctgaggagtatcagaaggtactgaagtattttgaagcaaaaaaagccaagaagttatttaaaacagatgaagaggcgattgaagagattcgagaaagcgaaaactggagaaatctggtagaagtagttgatgtcaacttcaggattcactttcgattggattctcacctcacgacgattcgacaggattttaatgagacacgtttgtatattgatttgtctgctgaagttgatgtgcagaaacaagcattggcagtaagcgcaggaattcctcagctcgttcggaagaaaaccgattatgttgatgaccaaaagaatgggcaaatcattggtcaaatcagagacctagatccagcaattgctttttatatggatgatttaaacaattggaaccaagcactagtagaaaatatcagttatattgaacgatttagcgaagaaaatgtcatcaaacaatggagggatctgctctatggcgtcgtctaaacaaataaagatattccatattgcggctgcagctgtttcttcagagtggcaaaaacagctttcttctttgtttgtttatcaatggcttccgttagcctatgatttcagaaaagatgagcaggaactgcagctgttcgagaaagacaaatataacagcaagtaccatcgagccctttttctactagagaaagatgcgttgattcttgaagacaaggagctattggaacaactgccagcctatcaaatcttttacgaaaaaaactgtcagctgtctcccgaagttcaagcgctcttcacattaaaagcagcaaaactgtttgatgaacaacagttggaaaatgtttttagtagcatcaatgaacaattttcagcgaagcagcaaggatataagttatcgatggatcacatgaaatttaataaagatgtatcgttgcaaatcactaaagaaggacatgcagcttgtcaggtaaaggcacaattgacaccagattatcagcaaatcactacttggaaaatgacgaacctgatccctaaagaggaacggacatgtttttatcccgagatcgcaaatatccaaggagaggcgatactgaagatcaaactttttttcatcaaagaaaacacaaatcaggtcattcaagtgattgagatcgcccacgatcgcatcataaatggggatccgatttacttcaaattggatcaacaggcatacatcaacgtttcattgtatgccaaaggaaatcaaggacaatttacgatcggacaaatgcacttgcgacgagcaatggcagatgaaagtgtcatgattccagggggcggccggatccgggatgatgagcatctgggcggagaagtgatctattactttaatccaggagacctaaaacctccattagcggtttatttttccggatatcgctctgctgaaggattcgaaggacgtggaatgatggggagcatgggctgtccttttttgctgattggtgacccccgtctagaaggaggaaatttctatctaggcagccagaaatttgaacaagaaatcgtaacaatcatattagaaaaactagcattgttgggatttcaaaaatcggatctcattttgtctggattgtcgatgggcacttttggcgctctttattatgcgagtgatttgagtccaaacagtgtcatcgtggggaaaccgttgacgaatcttggatctattgcactcaatgaacgcatcaatcggccaacaggatttccaacttcattggatatgctgctttacaatattggctttgtttcagaagaagcaagtagtcaattgaatggacgtttctgggaaaagtttaaaagtggagactacaggcaaacgacatttgctatcgcctacatgaaacaagacgattatgacatggaggcatttccaatgttatttgaatttctaaaaaacaattttcccatgactcgtgttctatataaaggcatgataggccgtcataacgacaatagtcccgctatcaacaattggtttttgaaacaatacaagaatattcttgtgcatacatttcatcggaatatcaagaaaattttataagaaatgggggagtcgatgaatcgcatgtaccgtatcaagtgggggatcgactttaatgataattacaattatggcgcaaaaatagcctacacatcctctggtgacgtcgcttattcttcacctctgatgcctcctggcgtcagtattaagtcctggtattcgaaaacagaatttcacagtagtcgaaaatcacctatgttgccgatgttgctgcctggacacgagtacgagttaacacttcatgctgaattcgatcgtaaagaagcagtccagctgctggtggaattttttgataaagacggcttttttcttgaaaaactggtcttcgaaacaactcaagagagcttccgttttccacaaaacgccactgattaccaaattcatatggtaaacaaaaagcaccaacagattctttttaaggaattggttttatctactaaggagaaccaagctttggcggtggttcctataggagcaaactcaggaacaaacattgttgcagttactccgttggtgggggaaagtgctgcattatcggtcgtattcgaaaaacagaatagttatgtcaaagaatattcacttcctgattgtgaagcgggattatttattgaacccggtgttacggctgcttcatcgtttttggaagttttgcttgaacaaatctatcagcgaatcgataatcctgatcaaatcacccttaaaatgggacaaaatttttctttactggaatcctgttatcacgatgatttttctatactggctttattatttgcaaaaccaaacaaagaaactgagtcaactgagcttatgcatcgtttgcagaaaaaaatcgtacttaatcgaagggcactgaatgtattagaaaatttaaaagaaaatagaaaaaaatcaacctaaataaaagggggacatcatgaatttttttgtaaataaagcaatgggaatcggcaattctggtgtggaacatgcacagttctaccgtgctgcttgttttgatagaaaaaatattccgtataaatatatttttatggaattagtaaagaatcttcatgaagcgatggcagcttggaagataccagacaataaagtcatctccatgtgggaatattttgccctagaaggtgactatttaagacaaggagctaaagcgaattttaccgcgaaacaggatctcttggtagacgccacgaacacgcataggattaaagaaaccatcacatcatcaggattgaaaatcgttgagcacatggaaaaatcccctagccgaaaaaaagaagggttattgctagtttcagattatcgggtagagatttttgactatcgaacgaatcaaagaaaaatcatgtacagctatcgcaatgatcctcatcgaggaagagtgatgacgaatattcacttgtttgcttttaagggcaaacatcgcttctttagaaatgaagtcttgctgcaacgctttttctttaaacaattgatggaagagttcccagaaaccaaaactatcatcattgatcgaggagaagaaagtgaggccgccttatatgatcattgtcctccagaaatcaaattgatcgaaatagtacatgctgatcatttatctgatcgtgatgtacctcgtgcgcctctttggaacaattattatgaatatgcattgacgcatttagagcaagttactcacatcgttgttgcgacagaattgcagagacaagatctactgatcgattttccaaacgaatccgaaaaaattgtgacgatccctgtgggggggattcgcgatatgacagaagaatcatttgaaaaaggcaaacaacaggcggagaagtttgtgacggtctctcgcttggcatctgaaaagcacattgatcttgtgatacgtgcaattgctgcagcaaaaaaagaacatccaacgctctctttagatatctatggtcaaggcggagaagaaagcaagttgaatgcaataatcaaggagctaaatgcagaagaatatattcaattaaaaggccactcccatgcgatcaatgaggtatatcccaattacgatgcctttatttctggctctttttcagaaggatttggattgacctatatcgaagcattgaatgcgggattaccaattgtgacgtacaaggcacgttttggggcgatggagttgatcaaagaaggggtcaacgggtatttgaaagacttttccagaaatgatgatacctacaatgtccagcaactaacagaaggaattcgtcagttagtcgctactgatttaaaccaacttaaagccaacacccgcaagtctgtccggatgtttcaagactcgataattgcagagaaatggagtgagttgatcgatgcattatgaattagtcactgtgatccgacccaatgaccggatatggatgacacaaaaatcacgaatcaaagaaggaaaccaagtgttgtctatctcaccaagtccaaattttcaagcgatgcttcaaaaagaagcggtgcagggaataaatattttagatcaagtcacacaacggagccacgatccagaaacctttttattttttaaccaagtcccaacggcttattgtacagaagtctatatgaacgaagatcgtaccatttcgttgattacagacggggatgaaataggcaaagtgagcttataccctatgactagaagacatgtcaaagaggtacggtacttctatccggatggtacgatagacttcattgaagaatatgccgctgacgggaaattgttctcaactatttattattgtaacgatcaggtccaagagattgcttttttcaatgatcagcagcaaagcatcttgaattattacttttatcagggagcaatcaacttggtcacgattcgtgatactgcaacattgaaggtaacccagaaatttaatacaacacttgatttcattcgggaacagttagctttgcggttaacagaaaatgataccgtgggaatttcatacatgggattagaattgttcgctttagcaacatctaattcaagaaataccctgtatctagaagagtcgcctcttgatggcaaagggaatatcaaaggaaatttaatgagtattttagatgatcacatcccttacatccatagggtggaagtggatcagaagaattatcaactattggcaaataagaatgtttgcatggacaaagttgtcttgaaaggatgaagacgaaatgaagaaaatgaaggtcaatgaattgtatgagcaaatcatgtcattaatcaaagaaaacagcggatccatgctctcttttgagaatgagcaggaggaagcaaagcgcatcctgcatcaacaaaaagaattgattgatcaattgattcagatcaatcaagagatgaaagcaatgatcaataagtcagaaaatgacatcgatctaaatgagatccaagcgttaaaaaaacaattcaatgcgtcttttgagcagcaacaggaagagcaaaacagattgcaaatgatttatgaaaaactcttttctgcttacgaggttgaaaagcaaatgcttcggacgtatttcttgaatgaaaccgatcagatcattgatatgttgacctcaaccgtagaaagacaggatagcgaagtgagtcaattgagtcaagagctgattcatgaattgcgttcattagaagaaacagaagtagaagctaatacaggtgcagaggaaaacgaaccaacagaaaacgttgcagaaatgagtgagtcgctatagctggcaactgatcaaatccaatagttaaacactgtattcttcatagttgttagctggaaataaactggggagaggtgatttcgttggcaaataatcagttagataaaacgattcaagcaggatttcaagaagaacgagaaaacgtaagagatcactcggaagagaaaaaaaagggaaagctgtcaccatcgtgctttccttggttatgtcgatcgtgatccttggatcgttggtctattctttgttggaagcattacagaagtaaaaattggaaataggtcctgcattttagaaaaaaggatttgaaaaatatggaaactagattactaagcgtttgtcgattaatcagtacgatcaacccagacttaaagatacctgatacatcagtagttgctgtcaatattgatcgcgagaaattagaagaaatccgcaaatgtaaaggtctatctgttaagtcttttgaaagaaagattgggttatctcgctcacgatactataggtgggtacaatatgaaatcgacctgcctttcgaaatggttgttggaatcaagaaaatgttgagcatatcagataccgtattgttagacatgtttgctatgtcaacagatgaacaacttcatctattaagtgtactgatttatagctctttatcaacgaaagaggacatgttcgtcacctttctcaaagtcagaaaagagttagaaaaatttcgtcctgctactgaggataatgtgatgtttaaacttatgctggcctattctgacctcgtgttcggctgtatgaaccagaaagtcccacaagcaagtttagagatgcttgaaacattttttctcggaactgatttttatacattgtttgatagtctcttatatttggctacgttgcgcatcaaacatcgctatggattgcaatcctcttctttagaaaaacaaatgtttctgttagaaagctgtctattaaagaaaataaatgcaactgactttactgaactgcgaccagttttagtaggagccgtattggatttgtcggaatgtttggtagatatgcaacgctgtgaagatgccattcaattgcttcaacatgcgagtcgtttaatggaagaacattggcatattgatgtctacaatcaaacggttctaaagctagtcaaatatctgatccttacaaggaatacttcgcaagaagatccagctgtgcaactgttttccaaaaatttgaaaggtgcagaatggtgcttaccaaaagatgaagtgatgtttgtgcgagcaatgatggaaaaggagatggggcaagcgtgaatcggtgggtgacgacgatcattgaatcgaatgcagcagattcagtcaaaaaggcgaaagcagatgtttgtgacattgccaaggggatggattatcagcctttatatatttatcgttatatcgatgagaatgaagatgattacgcacttacctcgaggattgatggcattacagctggtgttgccaatcaagatatggtggtctaccaatatccaagctataatggtgcccatttcgatcggatgtttttacaaagaatgaagcaaagagggatctatacgatcttattcatccatgatgctgagatgttgcgagggaaagtcgactttgatgaagctgctcttttcaacgaagccacattattaatcgttcatagtcaagctatgcagacagctttagtcgaacgaggagtgatccgaaaaatggtccaaaaaccgttttttgactatcgacacaaggaagtaagtgtcagtcatgagcggccagaaaaacgagttgtctttgcagggaatttagcaaaaaccctttttttacagcaatggcccaatcgcactgaaattctcgtatatggtgaaaagaatgatcgcccttttggcgcaaatgtccattattgtggtgtatttgagcaagaagaattgattcgcaagatggagaagaatggctttggtcttgcgtgggatgacaaattgccagctggtggtgactatcaacagtacacgaagtataatgcgcctcacaaaatttcattgtatctctcattaggcatccctgtcattgtatggcaacaagcagccatagcagagatggtacagaaactaggacttgggattgttatcgctgggattgaagaaattgaccataaattaggtgagttaacagatgaagaaatgctgcgaatgaagaacaatgttctttcatttagttgcttactgcgatcgggaatatttactaggactgcactagtggattcagaagtaaaaatactcctaaacaaaggggcaaatcaagaatgacacaatcgatgatcacaaagaaattatccgcaatcgtccagatcagcgagctagaccagatgctagcagagatgaatcaaacgatcgaacaacgggatagtaaaattgagcgattaaagcaaatgatctcagaaaaaaaacagtccaccattgggtatcgcgatttttttattctgaagaactgtcaagatgagctgagagatctctgtcaaaaaattgacttgcagcgggtcaaagtcaatgatcttttggaacatgtacgcaatacaaaagcgattttcaacgatttgttttttttagaaacagaagtcaacgaacaggcgaagaaaatacaagaactgtcaaatgcattctttattcaagcggagacaaaagagtagcggctgaaacaacaacagaatgtttggggagcaagaaatcatgacaaatagggaagttaggaggattagtgtggacaaaatcattgcattagacattgatgaatttcgagtaggcgtcgttggctatggttatcaagatgtcagaagttctgtttattcagaagtcaaaaaaaataatctgcagtatcttttaggaaagaataatgaaccgacccactccaaaaacaaagttggggaacgaattcttctcgggggaagcgagcaagaaattacttggggcttcgacaagttatatagtcgacgttcgaaggcttaccaaacctttggaaatccattggcagccattggagaccaaaattttaagacatatatcaaaacgatactttcttatttagtagagaagagaaccttgattttcactgaaattgcaaaggattgctttagctgctcattgtgcattggcgtagcaacagaaagttttgaccagctggctgaaatcgagaggcaactggcagatgaattcgagacagtcgttaatggtacccactatcggatacgaatcgaacgagtaaaactgattcccaaatcgctggctgtgatttttgaaagtaggcgaaacgatattcatttaatgttaggcgttgaagaaattctggcgggattgacttatgtgtttgagattaatgatcattatctaacttgtgacagttatgaaaatggcgaactgatcaaaagtacaaaagttacagacggcttgtatgaattagccggcaacgtggtacaagcttaccaagaaaatgagggaaatcatcccacgctaacttttgatttggatgctggggtaatctacgatatgctggtcacaacgaagaagaacaatccatttattgtgacgatcaatggacgtcagaccgtcgatttaaccgaaatcgttaaaaaagagctgacggctttgacggatcaattcattgattatgtcaatagtgatcaggatgttcaatatgcggatacaatactgatccgggatatttctgcaggaacgatcaatgaaaacacagtgaatcaggtattagctaaaatggggctatcttgtaaagtgtttaataataaaaatgcgctgggaatgtatttatttggggaattgttctggcaagaccaaccgaagactttggctgatcgctttgaggatagccgtccatcagctatgaatcatggtttttcagaaccggaagtgcgtgcagaatctgcaccaatcgaagagtacgtcgaatcaactaaccaaattgattccgagctatcagaagttaccgagcaaaagagtcattatcgaagctcatctgtggaaacaatttttgcagaacagtcagaattgcttaaattcttgatcaatgatgacaaggagccttccatttagcaatgaaaaagagaattttgatcgataaacgatcaagattctctttttcttgtggttggatttttttgcttaaatccgatactcgaatagggcaagaattggtcatcggcaatcatctatcagccaaactgtcgcagatgaatgaaggatcattctgtgctttaatcttcttcggaggtttactccttctgattgctggtatcttcagctaccgtcaccgtaaaaaaaatctttggggaaaatcaatttatctggttcagaaatgttttttctcaaaggtttttgattactggttattttataaggacacctaaaatctgtttaaatttttggctcatttgctgtgcagatggtacactagagtcaagggagggatcctatgctttggctgataattgtacttattggactgattgctgggttatactatatttaccgaactgcagtcctaaaaaaaggtgtacgttattttgtatctgctctgatcatgcgcaataaccattggtatgaaaaagaaggcagaaaacaacttgttccttcgggacagcgatcacaggaagcaccttcaactttctggcaagaagggtccgaatgtacccttactgcaacggatgatgttctgttacatgcacgggtctttgatcagtgtgccaaaacatgggtgatttgtcttcatggctatcgcagttctggacaagtcgattgtcaagatgccgcggaacgcttgtggcaagccggacacaatgtcttagtgccagatcttcgcggacacgggcaaagtgaagggcttcaaatcgggttaggctggttggatcgcttagatctgattctctggatcgagaaattagttgaaaaagatgcgcaatgccagattttcttgtatggtcaagggatgggggccgcaacagtcctcttagcgagtggagaagtattgcctattcaagttcgaggattgattgcagacagcagctatacctcgatctatagtttgatacgagccaatttaccgcgtctttctggattacccgtcaaacggttcctgcgtatggcaaatcgttacagtaaacaattagtagggtacccatttctacagatctctgtcacacgccaactaggcagtaaccatttacctgttttatttttacatggttctgaagatccatttgtctcagcagaagaaacagacacattgatggaagcaactgctggggaaaaaaaacgagtcatttttccagagatgggccatcttcaagcggtcacagaaagtccagaatattggccgactattctacaatttatccaggcaacagagtaatagtgcatttgaatttttttaactagaaaggaatgtgaaaaaatggaaatcaaagaagaaaacaaacgttttgccttatacgatgacggcaaggaaataggagaaatcacctggcaagaggcgccagacgatgtgttggtggttgatcatacatttgttgattctgcgtatcgcggtcagaagttagcacaaaagttactgaatgcggtggtagaaaaagcgcgccgcgaagatcgaaaaatcatgccagtttgttcattcgctgtcaaagagttcaaagaaaaatcagaatatgatgatgtattggctcgctgaatttcggtagaaaatgattgagacaacagtcgtgcaacaacgatctttatgttgctgtacggctagtgtctttttttgttccgggatttagtagttgtcttgtttggatgcagggaacatcgccatagcatcaataaaatatactggaaaaaaggtcccgaatgtggtagagttaaaaagacgattctagcaagcaaggaggagctatcgtgtacaatatattattagcagcagtgattgtgatttctgtgatcatggttattacgattatgatgcaaccaagcaaacaaaatagtgctgccagcgcgtttacgggtggagcagaccaattgttcggtaaacaaaaagcgcgtggatttgaagcggtaatgcaacgttcaactgccattttaggctttgtatggatggtcttgctatttcttttggcctatttgtcatcaaaataattggatgaaatttggaacctctcggctgcgaggggttttttctttgccaaaaatcttatgaacgcatttatcgttgaaatcatcgaactatggtagaattggacgtgaggtgaaacgaagaaatgaagaattttaaccaaccaaaaccagtgtttgctccccacggagatcgggcagtgattttgttccatgcttattctggtagtcccaatgatgtgcggatgctttgccggtttttagaacaaaaagagtatactgtttatacaccgatgttttcgggtcatgggacaacaaaccctgaagatattttgaatcaaggaattcaacaatggcgagcagatgccaaagcagcgattgaatttttgaaagaaaaaggttaccaaaaaattgctgtgttgggattgtcaatgggaggcatctttgccatgaacagtttgacacaagcggaacctgcgctaatcggtggtgggctattctgttcaccgctctttgaaacaaagaatgatgtgccgcgaaattttgaaaaatatgcagaaatgattctgcaatactcttcttattcatccgaagagcagcaaatgattttggctcgcgtaccgcaacaagtcagagatcagctgctagaaattgaatcgattgggcaagaaacagcaactaatcttgacacgatcgatgtgcctgtttttcttgcacaagcaggaagagaccgtatgatcgatccccagacggtttttcgcacagcagcagcattgtctcatgtgccctacacattacagtggtatccacatagtggacatgtagtgactgtcggcccagaacgaaaaaaattagaacaagatgtttgggcttttctggaaagcctcgcttgggaagggtaaaaaatgaaagagacgattaaaacaaaaattattcagttcatggaagaaagccgcaagaaaagcttttccatggaagaaattgccgaagcattgcaactgcaaaaaagcgaggatttcaaaaatcttgttcaaacagtagccgcaatggaacgagaggggagcattctcttcaataagaaaggcaaagtcaaattgccaatgcagcgagtcttagttgaaggaacattccgagcaaacgaacgaggctttggatttgtgagtatcgatgaggaagaagacatctatattcctaaagaatcgactggctatgcgatggatggagatacagttgctatcgacatacttcatgctgctgatcctttttccgataaaggggcagagggcaaagtcgttgaaatccgcaaacgggcagtcacacaagttgtcggtgagtttacactctttgatgaagcggagatccaagaaacagacctctatggagtcgttcagccaaaagataaaaaaatgaatgagttaaaagtattcatcggtgcagaaggcgttcgtccggtagatggcagcattgtgatcgttgagatcactcactatccggagaaaggctactctaaaagcttggaaggactagtcaaaaaagtagttggtcataaaaatgatcctggaatggatattttgtcgatcgtcgtagctaacggcattccgacaaagtttgaagaagcaacattagcggaagctgatgcagttcctgatgccattgatccggcacaattcccagaacgtcgtgacctgcgggaacaattgattgtcacgatcgatggggcagatgcgaaagaccttgatgatgcggtcaccgttcgtaaattagccaacggcaactttttcttaggggtccatatcgcagatgtttcttattatgtgacagaaaacagtgccctagacaaggaagcttttgaacgaggcaccagtgtctatctgaccgatcgggtcattcctatgatccctcagcggctgtcaaatggtatctgctcactgaatcctcacgttccgcggttgacaatgagttgtgagatggaaatcgattcttcaggtaaagtggtcaaacatgagatttttcaaagcatcattcaaacaacagaacgaatgacttatcaagcagtaaatgaaatcttggaagaccaagagcctgagacaatggcgcgttatgcctcgcttgttccgatgtttaaggaaatggctgaattgcatcaaatcttagaagcgatgcgcgttcggcggggggcagtttcttttgaggatcgtgaagccaaagtattggttgacgaagcagggcatcctcaggacatccttcttcgcgaacgaggagttggcgaacgattgattgagtcctttatgctggctgctaatgaaacagtggcagagcatttcaacaaacgtcgattgccgttcatttatcggatccatgaagaaccaaaagaagaaaaaatgcggcgcttttttgattttgcttctgcgttaggaattgttgtcaagcagacaaaaggctccatcacgcccaaagatctacaaaaagtcgtggaagatgttgcagataaacctgaagcgatggtggtcaacaccatgctgttgcgaagtatgcaacaagcaaaatattctgaagataactatgggcattatggactggctgcagactactatacccacttcacatcaccgatccgccgataccccgatttgatcgttcatcggctgattcgttcatacagtacggatccgtcagaaagcaatcaagaaaagtgggagcagaaccttccagatattgctttacacagttcacaaatggagcgaagagcagtggaagcagaacgtgaagtagatgctcttaaaaaagctgaatttatggccgataaagtaggagaagagtttgacgggattattagctcagtagtaaaattcggacttttcgtggagttgccgaataccatcgaagggttaatccatattactgcattgaaacaagattacttccattacttggaaaaccacctcgcattagtaggtgaacgtactgggcaaacgtttaagatcggacaaaaagttcgcatcaaagtgatcaaagcggatccagagactcgcgaaatcgattttgaattgattgaagcagaagaagtcgtacgaatccaacagcctaaaaaaaagcaaaataaagaaaacaaacagcgaagacaaacctcagatcgacagaaaaaagaaaatttacggggaaaatctcctcgtaaaaagaaaaaaaacggaaattcaaaaaagaaacctttctataaaggaattaagaaaaagtaggagggatgaccgttgcctaagggagagggcagactaattgcccaaaacaaaaaagctcgtcatgactacacgatccttgatacgatcgaagcagggatcgtgctgcaagggactgagatcaaatcgatccgcaacagtcggatcaatctaaaagacggctttgttcgtatccgtaatggagaagcctatttgtataatgttcatataagtccctatgaacaggggaacatttttaatcatgatcctttgcgtacaagaaaattgttactgcataaaaagcagattgctcggttgatcggtgaaagtaaaaatacaggaatgaccattgttccgctaaaagtttatatcaaagatggttatgccaaagttttgatcggcttagccaaaggaaaacgcgaatatgacaagcgagaaaccctaaaacgaaaagatcaggaacggcaaattgatcgtgctcttagaaacttttaatcttctaagaagttcttttagaatcatttaaagtgtattgctttgagattagggaaaaatttggtagcatttaaggcaaaggtactgatgtaccaagcttttcatgaaatttcacgacagtgtttcaattaattttttttcgaattttggcagaaaaacttttttgtctaattttcttgaaaatactttgaaattttcttgtcgtggtggtatgataccgattgttatgagaggaaacgcattgtaacaccagatattttctggagatgacaggaaaagaggtgagaaagattggatgaaaaatcgcttatgtttcacatcggtccgatttggtttgatggaactgtagcaatgatgacaatcatttcttgtataattgtttttttggtggtgttcatttgtacacgaaatttgcaaatgaagccaaaagggaagcagaactttattgaatgggtcattgattttgttcgcggaatcgtagctgacaatataccaggatcgcaagtgaacaactttcatttgctgggtgtaacaatgtttctttttgtgtttgtggcgaatgaaattgggctggtcacaaagatcgtgacagctgatgatgtctctttatggaagagtcccacagcggatccttttgtcaccttgacacttgcacttatggttattagtttgacacatttctttggtatcaaaacgcttggtttcaaaaactttatgatcaattcttacttgaaaccagttggtttcttattaccattgaaaattatcgaagaatttacaaatgttattactttgggcttacggctttatgggaatatttttgctggagaggtcttgttagggttgatagcgaatatgttcacaagtctaggttggtggtcattgcctatcgcgatgccgcttgaaatgatttggattggcttctcattgtttataggcgccatccaagcctatgtatttgtcacattgaccatggtatttatgagccacaaaatcgtggcggaacactaatcaaaacaaacacttttaggaggaaaaacaatatgaatttcatcggagcaggattagcaattatcggagcagcaattggtgcaggttatggtaacggacaagtaatcgccaaaacgatcgaatcaatggcacgtcaacctgaaatgtcaggtcaattacgttcaacaatgtttatcggggtagcgctagtcgaagctgtgcctattttgggggtagttatcgcgttgctattagtcttccaaggctaaacgtgaaaaaggcagaaacgaacaatgcactcgtttttgcttttttaaatgagagaattactttcagaaaggaagagtcgttatgctaaatcacttggttctagcagaagtaaaaaatgctatgcttggcaatattattcttgtcagcggctcaattcttcttttgctattcttgttgaaacactttgcatgggatgccattagtagcatgatgcaaaaacgggaagaaaaaatcgccaatgatttggattcagcggaacaatcccgcttgaatgcagcgaaactggaaaaagaacgccaagaaaaattggccaattcccattcagaagctgcggagatcatcaaaagcgccaaagacagcggagaattgagtcgccaaaatattttgaacgagaccaaagaagaagtttctcgtttgaaagaaaaagctcactcagatatcacgcttgaaaaagaagctgcgttaaaagaagtcaaagatgatgttgcagatctttcacttcaaatcgcagaaaaaatcttgggccgtgaattgactcccgaaaatcatgaatctttaattaatcaatatatcgaaggattaggttcagtcaatgaaactcgataaatttactgtaggtaaacgctatggcaaggcgttgttcgaattggcgatggaagaacaacgagctgaagctgtttatcatgagttgatgacactacgtcagatttatcaagagattccgatgtttggccaaatcgtgaccgataatcgtttggatcttcatgaaaaaagaaaacttgttgatcagttatttaataactttgatggattagtcaaaaattttcttgagatcgtgtatgaatataatcgtatggacgacctattgctgatcattgatgagtatgaatgccgctatgacgagcagcaaggtttagtcagtggtacggtgaccacagcagttgcattgtcgtcaagtcaaaaagaacaattgtcgaaacaaatcgcacagacgctcggctaccagaaagcagtgctttcagaaaaagttgatccagccattttaggtggggtcatcgtggaagccaatcatcaagtgatcgacggtagtattaagagccaactggattatctgcgacaacagatcggcagataaacaagagataagaggtgaatcggatggccatcaaagcagaagaaataagtgccttgatcaaagaacaaatcaaaaattatcaaaatgaactttctgtagaagaaattggaacagtcacatacgtaggggatgggatcgcccgggctcacggattagaaaatgcgatgagtggagaattgcttgagttttcaaacggttcttacggtatggcccaaaacttggaatccaacgatgtagggatcatcatcttaggtgaatttgaatccattcgtgaaggtgacaaagtaaaacgtactggaaaaatcatggaagttcctgttggggatgccttgattggacgagtagtgaatccgttaggacaaccaatcgatggcttaggtccaatcgatacagataaatctcgtccggtagaagcagctgcacctggtgttatgcaacgtaaatccgtttcagaaccaatgcagactggattgaaagccattgatgctttagttccaatcggacgcggacaacgtgaattggtcattggtgaccgtaaaacagggaagacaaccatcgcaatcgatacgatcatcaaccaaaaaggtcaaaatatgatctgtatttatgtagcgatcggtcaaaaagattccacggttcgtgcacaagtagaaacattgcgccgttatggtgcgcttgactatacgatcgtggtatcagccggtgcttctcaacctgcaccactattatatatcgccccttatgctggagcagcaatgggtgaagaattcatgtataacggtaaacacgttttgatcgtttttgatgatttatcaaaacaagccgttgcttatcgggaactttccttactacttcgtcgtccgccaggtcgtgaagcttacccaggggacgttttctacttgcattctcgcttattggaacgggctgcaaaattaagtgatgaactaggcggaggctcaatgactgccttgccattcgttgaaacccaagcaggagatatctctgcttatattccaaccaacgtgatctccattacagacggacaaattttcttagaaaatgacctgttttattcaggtgttcgccctgccgtagctgccggactttccgtttcacgggttgggggttctgcacaaatcaaagcgatgaagaaagtggctggaacattgcgtttggacttggcaagttaccgcgagttagaagccttcacgcaatttggttctgatttagatgccgctactcaagcaaaattgaatcgtggacgtcggactgttgaaattttgaaacaaaaactgcatgaaccattagcagttgaaaaacaagtggttattttatacgcattgacgcacggattccttgacagtgtgccagtaaataaagtattagactttgaagcagaattgtttgaatacattgaagcaaatcaagcagatgtgtttgaaacgattcgtgcaacgaaagacttgccagaagaaagcttattagatgacacaatcaaagcattcaaagatattttcatggctgcaaatacatcacgtgtttcagcacaagacaaaatgtcaacaatgcaaaatgcataaaagaggtgagaatgaatggctgcttcattaaatgagatcaagcaacgaattgcctcaaccaagaaaaccagtcagatcacaaacgccatgcaaatggtttcggctgctaaattgactaaatcagaagcacactcaaaacaatttcaagtctatgcaacgaaagtgcgtgagatcgttactcaccttactgcgcaacaactctcagatcttgcagctgctggacctaaagagggcgtcaattacaacagtatgcttgttagtcgtcctgtaaagcgcactggctatatcgtcattacttcagatggcggtttagtcggtggctacaacagttcgattttgaaacaaatgatgacgatgctggacgaagatcatgctcaagatgaagaatatgttatgatcgccatcggtgcgacaggagcagatttctttaaaacacgaggaatcaagttagcttatgagttgagaaatctttccgatcagccaagttttgacgaagtgcgtaaaattgttaccttagctacaacgatgtatcaaaatgaagtatttgatgaactatatgtttgttataaccatcacatcaattcgttgacgagccaatttcgcgtggaaaaaatgctgcctatctcagatttggatccagaagaagcagaaagctatgaacaagagtatttgtttgagccttcaagagaagcaattttggatcagttgttgccgcaatatgctgaaagcttgatttatggtgccattgtcgatgccaaaacagcagagcatgctgctggaatgactgcgatgaagacggcaacagataatgccaaaaatattattggggatttgacgatttcttataaccgggcgcgtcaaggagcaatcacccaagaaattactgaaattgttgcgggggcatccgcgttagaataatttcgagaacgaatggaggaatacgaatgagttcaggcaagattgttcaagtcattggtcccgttgtcgacgtggaattctctctagaccaatccttaccagatatcaacaatgcgttgatcgtttacaaaaaagacgagaaaaaaacaaaagtagtattggaagccgctttagaactaggggatggtgtgatccgcaccatcgcaatggaatctacagacggtttgcaacgaggaatggaagtcatcgatacaggtgcctcaatctctgtccctgtaggaacagatactctaggccgagtatttaatgtactaggcgatactatcgacttggaagcaccattcccagaagatgccaaacgtagtggtatccacaaaaaagccccagatttcgatgaattgtcaacaagtacagaaatccttgaaactgggatcaaagttatcgatttattagctccttacttaaaaggtggtaaagtcggcttgttcggtggtgccggtgttggtaaaaccgtattgattcaagaattgattcacaatatcgctcaagagcatgggggaatttcagtatttaccggtgttggcgagcggacgcgtgaaggtaatgacttgtattatgaaatgaaagaatcaggcgttatcgaaaagacagccatggttttcggtcaaatgaatgaaccaccaggtgcccggatgcgggttgctttgactggtttgaccattgctgagtatttccgtgacgttgaaggtcaagatgtgctcttgtttatcgataatattttccgtttcacacaagcgggttctgaagtatctgccttgttaggccggatgccatcagccgttggttaccaaccaactctagcaactgaaatgggtcaattacaagaacggatcacctcgacaaaaaaaggttccgttacatcgatccaagccatctatgtgccagccgatgactatactgaccctgccccagcaacagcattcgcccatttggatgccacaacaaacttggaacgtaaattgactgagcaagggatttatccagcggtcgatccattggcttcatcatctagtgcattagcacctgaaatcgtaggggaaaaacactatgaagtagcaaccgaggttcagcatgcgttgcaacgttatcgtgagctgcaagatatcattgcgatcttagggatggatgaattgtcagatgaagaaaagactctcgtagcgcgtgcgcgtcgaatccaattcttcttatcacaaaacttccacgtagcggaacaatttacaggacaaccaggttcttatgtgccagttgaagaaaccatcaaaggatttgctgagattttagaaggtaaatacgatgatcttcctgaagaagccttccgaagtgtaggtcgaatcgaagatgtaattgaaaaagcaaaagcactaggttattaataagcaaccatagagaaagaggggaacctcatggatcaatttttaacggttaatgtggtgacacctgctggtttggtgtatgaacaccatgccaaaatcgtggttgcacgaacgacagatggagaaatcgggatcttaccgcaacacgcgccgatcatcgtgcctttggctatcgatgaagttcgagtgaaacggatcgattccgatactcacgtcgattggatcgctgtcaatggcggaatcatggaagtgcgggacaatgtagtttcaattgtagccgatagtgctgaacgtgatcgtgatatcgatgtttctcgtgctgaacgtgccaaacagcgtgccgaaaagcaaatcgaagaagcaaaacaagtggaagatatcgaccaaatacgacgtgcgactgttgctttgcatcgtgcaatcaatcgaatcaatgtgtcaaaacattcctaagcgaagaccagtggtctttgcttttttttatctcaaaaacgttttaaagtctttttaaagtcttccaatgaaagtttcaagaaagaatattttggctcttttaaattttgtggtatgatagtaacgttcagatgtgaaaaggagaatcgaggatgcaagtttatggagtagatgcgattattcgtatcgtcagtcatttagcatttatctatttagcgttttgggcgttgcagtctttgcggatcgatgctttttttaaagccttacaaacgacgcaaatacggatggtcatggtctttttagcaattgctttaggctatactgctagcacttttttccttgaactgattgcattatgccgtaatttatttttaataggtttttaagaaattcaataatacatgcaggttgtgcgattgtatgctataattgtcaagattttgtgtatgattcaactgcattatttggagggaacaaaatggaagagattatcgttcaaggtggtaatcgtttaattggaactgtcaaggttgaaggtgcaaagaatgccgttttacctattttagcagcaagtttgttagcagaagaaggaacaacgactttagagaatgtaccgattttatctgatgttttgacaatgaatgaagtgatccgtcatttaaacgtcgagattgcttttgatcaatcaaaaaataccattacaatggatgcttcccgcgaattagctattgaagcaccgtatgaatatgttagtcaaatgcgtgcatcaatcgttgttatgggacctttattagccagaaatggtcatgcgaaagttgcaatgccaggaggttgtgctattggcaaacgaccaattgatctgcatctcaaaggattccaagctctgggagctgaaattattcaaaaagatggctacatagaagcgattgctagtgagttaaaaggaaatacgatctaccttgattttccgagtgtaggcgctactcaaaacatcatgatggcagcagtcaaagccaaaggaacgacgatcattgagaacgtcgctcgagagcctgaaatcgtagatttagcgaacattttaaataaaatgggcgcaaaagtctttggtgctgggacagaaaccatgcgcattgaaggcgtcgaccatttgcatgcggtctctcatgcgatcgtacaagaccgtattgaagcaggaactttcatggtagctgctgcaatgacagaaggcgatgtgattatcaaagatgcaatttctgaacacaatcgtccactgatttcaaaattaactgaaatgggtgctaaaatcactgaagttccagaagggattcgggtagttggacctaaaacaatcaaagcaactgatgtaaaaacgatgcctcatccaggtttcccaacagatatgcaagcgcaaatgacggcgattcaaatgttggctgatgggactagcatcgtgaatgaaacggtttttgaaaatcgcttccaacatttagaagaaatgcgccgtatgaacggtcatgttaaaattgacggaaacatcgctgtgatcgaaggcggccacgaattacaaggcgcgctagtttatgcaacggatctacgagcggcagcagctttgattttattaggcttgcgttcaaacggattgactcgtgtccgtaatctgaagtatcttgaccgtggctattataaattccacgaaaaattgcaacagttaggtgcttctgttgagcgggtaacaacttctgaaaaaacagcaccagtaaccgtttaaagaggagatgcgaccttgaagcttaatcgatatattttaactagtttggtaaaaattttgttggttatcttattggcgatcctgctctttattgccggcactatgatcggctatggtatcattggagacggtatgccgttaaaagtgttctcgcctcatctatggaaccatatattggacttcatgaagtaaacaaagctgaaactagaatggagcacattgctttattctagtttttttcaattctataaatagaagagagaggagtatgagatgtgagcaagcttttgattggatttgttcggctgtatcagcgattcatctctcccttatttccccctagctgtcgctattatcctacgtgttcgtcctatatgattcaggcgatccaagtacatggggcaggtaaaggaagtttgatgggaatctcgcgaattttacgttgtcatccgtttgtaaaagggggaatcgactacgtacctcagcgctttacactaaaacgaaatacccaagatcaggagcagcctacttatcactatcgcaaaaaataaacccttcaaactgcaggggtaggcaggaatgaacggagtaaaggagcaaaacgatgattcgagctttatcaccaaaagaatctttgccatggccgctattactggatgctgatccagaaaaagaagcggtagatcgatacatacaagccagtgagattcttgtttttgaaaatgagcagcagatcgtaggagtgattgtttatcaactgcaaacagcaggatgggaaatcatgaatgttgctgttgcaccggaagcacagaatcaaggaatcggtggtcgtttactgaccgcagcgttaagtaagattgctgcaacaaaaactacggaaactctttgtgtaactatcaaaactggtaatcttccttccgcagcgttaacactttataaaaaaatgggtttcattgaaaaaaaagtagtcaaaaactattttgtcgatcattacaaagagcccatttatgagaacggcattctacttactgatcaagtgattttagagaaaattctctaaaaagcatctcgcgcactttgacttcatttgaaaaatgggttttgtccgccattcatgttactctgaatcaaatcatttagagcgcgttattgtccttttcaacgaaatcaacagaaatcgctttcttaactgaggaaagtacagtaaaataagggagacaactgagtgagaaaggaatgttgagatgacattactagtatttgatatgggcggttctgcagtgaaatatggattatggcaggacgaacaattaagtgacaaaggacaatttgcgacgcctgatacttggcaaaaaatgaaagaagagctcaaagcaattcgagatagcattaaaaaacctcttgaaggcgttggcattagtgcgccaggagcggtgaatgttgcacagcagcagatcaatgggatcagcgccattccatatattcacggatttaatattttcgctgaattggaagcgttatttcaattgccagtcactattgagaatgatgccaattgtgccggaatggcagaattttatcaaggcgctgggaaagattttgacacggcagcattcatcgtgattggtactggggtcggcggagcactttttcaacaaggaaaactgatcaaaggcgcccatctttacggcggcgagtttggtttgatggttcttgataaaggcaaatctttttcgcagttagggacggctgttcaaatggcttggcgttattgtgaccgaatcggtgtggaccgcaaaacgatcagtggcgaggaagtctttcgtcgagcagaagaaggtgatattatcgccaaagaagaggtagacaaattttatcgctatttgactgaagggttattcagcatccaatttgcttttgaccctgaagtattgattattggtggcggagtcagtgcaaaagcaggattgttgccagaaatcaatcaacgaatgaagaaaatgctggcagcacaagacttaaatgactttgttccactgattaagctttgtgactatcgaaatgatgccaatctagttggagcggcagctaatttcaccgcacaagtgctgaattgattcagctcattgttgctgccattttttcaattttaaacataaaccttgaatcaacagatacacaagttgtgatcactttggaagagtggtcacaactatttttttcggaaatcgattacaatcgcgacgcatcaatctttattttttttaaaataatttaaagtatctgaataaagaaaatattctgataattcgttgacattttccctattattaagtatatttgataacatatccatgggagtaggggaggaataatgatgaaaaagaaatttgcatttttatttgctagtttatttttattatcggcttgtagtgcgggaccaactggtggttccactagcggtagcggttctgctagcggtggcaacaaacaagaaggtgatacgatcaaaattggtgtcaatttagaattatcgggtgctgttgcagcttatggaacggcggaaaaagaaggaattgatctggcggttgaagaaatcaatgagagtggcggtatcttaggaaaacaaattgaaattgtttcaaaagataacaaatctgacaataatgagtcagcgacagtcgcagccaatttaacgaccaatgataaagtagtagcaatgatcgggccagcaacttcaggtgcgacgaaggcggcattgccaaatgtcaccaaagcacaagttccgttagtgacaccttccggaacagatgatgcgattactgtcagcagtgacaaagttcaaggatttgctttccgttcttgtttccaagacagtttccaaggaacgatcttagcaaaatatgctgcagacaacttggatgctaaaaaagcaattattttaggcgataattccagcgactatgcgaatggattatcagcagcctttaaagatagctacaatggcgacattgtactcgaagagaatttcacagaaggtgacaaagatttccaagcggtgttgacgaaaatcaaaaatgctgactttgatgtattgttcattcctggctactacaccgaagctggtttgattatcaagcaagcccgagaattgggaatcgatcagccaattattggtgcggatggctttggtgatgaaaaaatggtccaaacagcaggcgcggaaaatgtatcggatgtttattatacaggacacttctcaactaaagctcctgccaatgacaaggtagaaccttttgtcgaagcattcaaagcaaagtatagcaaagaaccttccgcatttaatgcattggcatacgacgctgtctacatgatcaaacaagccattgaagatcaagattcagcagactcaactgcgattgctgaaggactatctgctttgaaaaacttccaaggtgtgacgggagagatcaccatggacaaaaatcataatccagaaaaatcagcagttgtattaggactaactgaaggtaaagaaacgtcagctgatacagtaaatccttaaatagaaggaccgttctttacacgatcaaatagggactgagacaaagtcgaaggtaagcgaacaaaatgatgaacgataaatgaaaaagtcgtaaatctgtgatcctatcaatcatggcagatactcatttgactcgttgctgcagacttctgtcgcggttcctttttcttagacaagtatcaagaatttaaggtattggaagtgaaaacatggaaatgatgatccaacaactaatcaacggtttatttctaggtagtatctatgccttattagcgttaggctacacgatggtttacggcatcattaaactgatcaactttgctcatggtgaagtgtatatgatcggcagttttattggttattttttgatcaatcaatggaatctgggcttttttcctgcactattcatctcaatgattgctagtgcagcgttaggcgtgacgatcgagtttctggcctatcgcccactccggaattccacccggatctcggctttgatcaccgctatcggtgtttcctatttattgcaaaatgtcatgatttttttcttttcaccagatgtccgaccatttccacaagccattgcccgcaaaacttatagtattggttttgtggaggtaagtaacatacaattattgattttagcagtctcattggcgttaatgatccttttacagctaatcgtcaagaaaaccagaatgggaaaagcgatgcgtgctgttagcgtggatgcggatgccgcacggttgatggggatcaatgtcaatcggacgatttccttcacatttgctcttggttctgcgttggcagctgctggtgggatgttaattggattgtattacaattcgatcgatcctacgatgggggttgtgccgggactaaaatcttttgttgcggctgtattaggcggtatagggatcattcctggggcagcattaggtggcttcgtgatcggactaattgaaacagttgctactgcattaggtttttctgattataaagatgctttagtctatgtcattttaataattatattgttggtccgtccggcaggaatattgggcaagaacctgaaagagaaagtgtaggtgtcagtgatgaaaaagaatttgaaatacaacattacttggttagcactcgccgctgttatctacttcggtttgtttgcagcttataacggcggattgatcaatctattttcagacgcgattatcgtcaatatcggaatcaatattattttagcagtagggctaaatttaattattggtttttcgggacaattttctttaggtcatgcaggttttatggcgattggtgcttacgcaggggcaattttaacagccaacaatcctacatttggcggatttctttctggtcttatcgtggggatgttcgtttcggggctgatcgcactagttgtcgggattccaacattgcgcttgaaaggagactacttagcgattgcaacgttaggtgtttcagagattatccgtatcttattagtcaatttacgaggattgacgaatggacctgcagggatattcgggttaccgcaattcagtaattggcaaatcgtctttctttttgctgtcggctccatcttggtggtctctaattttatccatagtggaccaggacgagcaacattagcgatacgagaagatgagatcgctgcggaagcaatgggggtcaatacaacgaaatacaaagtgattgcttttgtgatgggtgctgtcatggctagtattgccggtacattatatgcaagttatcaacaatcggtatttccgaaagattatggctttatgaaatcgatcgatgtcttgatcatcgttgtgtttggcgggatcggtagtacgacaggagcagtggtttcagcggtcgtattaggtatattgaatatgtacttacaaggcttctcagatttgcgcatgattatttacgcactggcattgatcgccattatgattttcaagccaagtggacttttgggaacttgggaattttctgtgaagcgcatctttgataaatttacaaaaaagggggatgacacgaatgcctctattggaagttaagaagctgactaagaactttggtggtttggcggcagtttcacatgtcgatttacatttagaaactaatgaactagttggcctgattggtccgaatggtgcagggaaaacgacactcttcaatctgctgacaggcgtctatgaaccaagtgaaggcgacgttcttttagaagaacaaggacaatccaagcgattgaatggggagaagccctatcttatcgcagctatgggattatcccgcaccttccaaaacattcggttgttcaaagatcttacagtgatggacaatgttctgattgccatgaacagcaaacaaaaagaaggcttttttacgagtgtgttgcggttgccaaagttttatcacaaagaggctgcaatgaaagagaaagtcatggaattattgcgtatctttgacttagaaaataaaagccaaacactagcaaaaaatcttccttacggtgaacaacgacgtcttgagatcgttcgggcattggctactgaaccaaagatcctttttcttgatgagccagccgccgggatgaaccctcaggaaacagcggaactgactaaattgatctaccgtatccaaaaagactttcaactgacgattttattgatcgaacatgacatgagtttagtcatggaggtttgtgaacgcatctatgtactggaatatgggcaagtgattgctcatggaaagccagaagagatcaaaaatgatccgcgagtgatcgaagcctatttaggaggggaactctaatgctgcgtattgaaaatttaagtgtccattacggcatgatccaagcggttcatgatgtttcctttgaagtcaatcaaggagagatcgtctcgttgatcggtgccaatggtgcagggaaaacgacgattttgcggacgatttccggtctgatccgaccctctaaaggcacgattctctttgaaggcaaacccatccaaaaagaagctccacaaaaaatcgttgctaatggattatcacaagtacctgaaggacgtcacgtttttccaggactctccgttcaagaaaaccttgagatgggcgcttttttgcgaaaagacaatcaagtcaaagaggactatcagcaggtcttcacgaaatttcctgtcctaaaagaacgactaagtcaagatgcttcaacgttatcaggaggagaacagcagatgttggcaatgggacgtgcactgatgtccaagcctcggttgcttttactcgatgaaccatccatgggcctagccccaatattcatcaaagagatcttctcgattatccaagaaatcaaacagcaaggaacgaccgttttattgattgagcagaatgccaaaatggctttgtccattgctgaccgcgggtatgttctagagactggcaaaatcgtcttgcaaggaagcgggcaagagttattggaaagtgatgaagtcaagaaagcctatctaggtggttaatagcttacaacaaggaggatgaaaaatgagtgtacgtgattttatgaccaagaatgtcatcactgttcattcggcaatgccaatatttgatgcgatagacttaatgaaaaaacatgacatccatcgattgccggttgttgatcagcaacggttagttggcctgattacagaaggcacgattgcagaagcaatgccttcaaaagcgacaagtttaagtgtttatgaaatgaattatttattaaacaaaacgactgtagcagatatcatgctgaagaaagtgaccaccatcaaaccggaggcgctgctagaagacgcgattgcagtcatgcgggaagaaaatgtcggtgtgttgcctgttttagcagatgacgaactagtagggatcattacgaataatgatatctttgatgctttcttgaagatcacaggttactatgagggcggtacaagagtagctcttgagattattgatgaccacagcggtgtcttagcggaaatcacgcagttattaacagatcatcaattaagtattttaacgatcgtggtcaaccgaatggctttgaaaacgatcgtagagattcaagttgaatccagacaagtgtcagaaatcgagaaaatttttgccaatgctgggtatacggtattgagtgcggtattgaccaatcaaaaataagcaaaaatcatgcaaacacaatcagtgattgcatgatttttttctggatgaatggttgactagatttgcttttgctttgcggtgttttctggtagaataaacaaggtatctgaaagaggtgagtatgatgtcgaaaaaaaataaagatattgaagtccgtgtggaagaaaccgttaaggtgatccaaggaaaagaatatgaagtccatcaactagtattagggaaaaaagtgattggtgaaattctcgcatccggtccgaaagaattccaaagctttctgggcgaagaagatttaggtgcaagccgaactttggatgcagcaattgaaacgattttgcgccaatggaacttacatgaataatttcttaaaaaaaatgacattttgctcttgcaatttgttatatttttaggtattataactgagtcaggttttttaaaagccgtttggaggagtagcgaagtggctaaacgcgacggactgtaaatccgttccttcgggttcagtggttcgaatccactctcctccaccattggggtatagccaagcggtaaggcaacggactttgactccgtcatgcgttggttcgaatccagctaccccagtcagtgaacaatcaagaaaagtcagcaagcatgtcttgctgacttttcttcgttatttatagcaaaattctaagggttaaaagttgaagattttttttatttacgataggctataggtaaataactcaggagatgagaagatgaaatttaaattgaatctaaaagaaaaagtcaccgaagcagctgagcatgtgtatgatgttgtcaaacgtgaagattatgctattcgtattgcaccaaaaggtatcaaagttacacaattgcgtaaaacaaaagatacgatcaaatggcgttcaaagaatcattgattgcgaaaagacattgagtaaaacagcccaataacaaataaaccggacaagagttgtcacccgtttcacgttttcctgatttctgagaggaagtactgggggaagcaactctggttcggttttttgatttatacgatatactctccttctcgtatgttacccttcgatttcgataccgagaacggttaagtgtccattggcgactaatttaatgaccagtttagctagttggtcaggagtcatttgactatcggcagtaagccaccagtgcagagtaccaacaaaaatcgatgtcatatattcaataacgaaatccagcggtacttcgatggagctttctgtaatttttaattttgaaaaaatatggtcatattgttcatagagaatctccgcgattcgttgccggactaattcgatggctgcgccatccatgatggtcagataaaaaaagcgattgtcctgaatgtgctgatagatttttgtcatcgcaagttcgactcgtttgatcttgattcgatttccctggactaaatcttcaagggacaaaatcgaagtaaaggagtcgattgccatatcaaaaattttttcatataaatcttgtttgtctttataatgagcatagaatgtcgcacgattgatcatggcttcgtcggcaatatcttggacagtcacttgatcgtagcctttatgctctacgagtcggataaaagcctccatgatatgtttattcgtgcgttgaacccgcaaatcaacttttttcatttttgtgaacttcctctcaatttaaacgacatttttaccgttcctgttgcttatcccacacatcacatgaatctgtttgttgaaatctcaatagattgttcttaaaatagacataagtattataacaaacagtttgtaagataatcaacaaagtgttggataaagcggaggcaccctatgaaaaaattaagtgctggtatcgatgtaggatcgacgactgtcaaaatggtggtcttgaatgaaaaaaagcagaccctctttgccaagtatgaacgccactattcggatatcaaaactgccacaaaaaaagttttactggaagctcaggaagtcatcggtaatcaacaggtcgcactagcaatcactggctctggagggatgggactggccgaagttttagcgatccctttcgtgcaagaggtcattgcctgtactaaaacagtcgagacactgattcctgaaacaaatgttgccattgaattagggggagaagatgccaaaatcaccttttttgaaggggcgttggaacaacgaatgaatggtagctgtgcaggtgggacgggtgcgtttatcgatcaaatggcggtattgttgaaaaccgatgctaatggtgtaaatgatttagcgaaaaattatcaaacgatctatcctatcgcttcccgttgcggggtattcgcaaaaacagatgtgcaacctttgatcaatgaaggagcagataaagccgacatcgccgccagtatttttcaagcagtggtcaatcagacgattgcagggttagctgctggtcgtaaaatcaaggggaaagtggcttttttaggtggccccctttatttcatgtctgaactacggcgccgctttgtggagacactgcaaattgctgaagaagacattatttttccagaaaatccccagctgtttgttgcgatcggcgccgctttatatggagaagaaacagctcaactcaatacattattagcccggttatcaaccgatgattcagcgaaattgcaaccgtctcacacattggcgccgctatttgctacggaagaagagctcgcagtttttagacagcgtcatggccaatcttcggtggaagaaaaaaaacttgcttctcatacaggagcagcctttctcggtatcgatgcgggttcaacgacaacgaaagtcgtattgatcgacgaagtgggtaggattctttactctttttatggcaacaatgaagggcagccattggaaaccaccatgcgggtattacaggaaatgtatcagcagatgccaccagctgtgttcatcgggaaagctgcggtcacaggatatggagaacagttgatcaaaaatgcactgaaaattgacattggtgaagttgaaacgatggctcattataaagccgccgaacatttccaaccgggggtcgattttattttagacattggcgggcaggatatgaaggccatgactatcaaagatggtgcactctcttcgatccagctgaatgaagcttgttcctcaggctgcgggtcctttattgaaacctttgcgcgttcgctgaaatacgaagtcaaagaatttgcgttagcagccactactgccaagaatccagtcgatcttggttctcgctgtacggtattcatgaattcaaaagtgaaacaagtccaaaaagaaggtgcatctgtcggggatatttctgcgggtctatcctattctgtgatcaaaaatgccttgtataaagtgatcaaaattcgtcgcccagaagatctaggtgagaaaatcgtctgccaaggaggaactttttataatgaggcggtgttacgagcctttgaaaaaatcagcggcagggaagtcgtgcggccgtcaattgctggcttgatgggggcttatggtgcagcactgatcgcgttagaaaattacgagattggtgaagtcacagccttgctttcaagtgatgaattgagtcaatttactgctgaaaaagaattcactcattgcgggttatgtgaaaataattgtatgctgactgtcactttattctcagatggacgcaaatttattaccggaaatcgctgcgagcggggtgcccgcatcaaaatcaaaaaagaagagcgcaagataaatttagtcgattacaaataccgccgcttgtttaagtatcgcccgcttcgcaaaaaagaagcgtctcgtgggcgtatcggcattcctcgtgtattgaatctatatgaaaactatccgttatggcatactttttttacagaactgggctttcgcgttgaattgtccccacgatcaaacaaagaattgtatgagaaaggtatcgagacgattccaagtgataccgcttgttatccggccaaaatcgctcatggacatattcaagcgttgatcgaccaaggggtcccattgattttttatccaggaattatttttgaaagaccagaaacagcgcaggctgagaatcatttcaactgtcccatcgtacaaagctacccagatgttattcgcaacaatctggatgatatccgtgctggccgtgtggattatcgtaacccgtttctaaatttggcagacgaaacttcaatggtcaaagtgttgtcagaagaatttcaagattttggtatcactgagacagagatcgcgcacgcattgcggcttggttttgaagaattggatcaatttaagctagatgtttgtcagcaaggggaaaaaaccttacggatgctgaccgaaaccaatcagcgaggcatcgtactttctggcagaccctatcatttggatccggagatcaatcatgggatcgcggaagtgattacccaagagggctttcatgtattaacagaagatagcattgcgcatttgggaaatgtcggtcatttacgggtcgttaatcagtgggtttaccattctcgtttatatgccgcagcacgggtcgtcgctaaaagcaagcagttggaattggtccaactaaactcatttggttgtggaatcgacgccgtcacaacagatcaagtagaagagattatggaacaatatggcaaattgtacactgtattgaaaatcgatgaaggggctaatttaggcgccattcggatccgtttacgttctcttaaggcagctgtcaatgaaagggagaaaaaccattttattcctactcaacgttttgaagaaccagccaagatcacatttactaaagaaatgcgtaaacaacatactttgttattacccatgctaagcccaatccatcaaagcgggttagtcgatgtggcactgcaagcttcgggatacaatgtgatctgcttgccggcggatgatcgagaagcagtcaatgtgggcctgcgtttcgtaaataacgatgcttgctatccagccattatttccatcggtcaattgatcgaagcactccaaagtggaaaatatgacttgcaaaacactagcgtattgatgacacaaacgggcgggggatgtcgggcaaccaattatatcccgctgctgcgtaaagcattgaacgaggcggggtttccacaagttcccgtcgtttcggtctccatgggaaatcaaggcgtggagtcaaatcctggctttaagtttacattaccaatgctcaaacgcgtggctgttgcatttttgtatggagatttatttgaacgagttgtttatcgaacgcggccttatgaagccatctctggttctgtagatcggcttcatgaaacgtggcttaaaaaagttgaaaaaaatgtacgcaacggttcttttactttgttcaaccacaacatgaaaaaaatcattgccgattttgatacgattgatctgcaggacatcgtgaaaccaagagtcggtgtggtaggcgagattttagtgaaatactctcctacagcgaataacgatatcgtgagacttttggaagcagaaggggcggaagcggtagtaccagacatggttggttttatgaattattcgctttataatcagatttggcgctatcaaaacctaggaatggccaaaaaaagcaaatggatcgctgaatttgccattggattaatcgaacggatccaaaaaccgatggaccgtgcgttgcgggcttctcagcgatttgaaggattacactcgatttatcaattagcagatgatgctagcaaaatcttatctattggtaatcatacgggtgaagggtggtttttgactggtgaaatgattgatctattgaaatctgatgtgactaatatcgtttgcatgcagccttttggttgtttgccaaatcatgtggtcggtaagggtgtaatcaaagaactgcggcaccaatatcctaaagccaatattgctgcgattgattatgatcctggagtctccatggtcaatcaattgaatcggattcgtttaatgttggcaacggccaataaagctttgcaaagcagcaactaacattcagcgctttaactatccaataagactgtaccaatttgagggaactttttttcttattttgtcttttgtaagaagaacagaatgaaaaaaaggatttttcccttaaattgacagtctttttagttttttcattggttatttaggtatataccagttataatagaaactgaatggaggaatagactatggcagagaacttacccgtatacatacagatacatgatcaaatcaaagcaaacatcgagaatgaaacctacaaaatcggtgaccgtttgccttctgagcgcgaattagcgaaacaattcggtgttagtcgcatgacattgcgccaagctattcagacactagccgatgaagggattttggaaagaaaaatcggatcaggaacttatgtggctcgtcagaaagtacaggagaaaatgagcggaaccacgagttttactgagatcatgcgctcacttggacgggtgccttctagtaaagcagtggcctacttcttgacagccccaagttcgagtgaaatggaaaaattgcaattagaaggacatgagacgattttacggatggaacgcattcgttatgcagatgatgtacctatttgtttcgaagtggcgagtattccagagaaattgatttacaattttagtaaagaagaaatcatctcatctttgtatcatgtgttagaagaaaagggcggtcataagatcggagctgcctcacaaacgatctcagcaatgattgcttcggagcaaatcgctgattacttgcaaatcaaacgcggggatgcaattttaagaatgcggcaaactacctgttttgaaaacggacaaccatttgaatacgtgcgtacacaatacgtagggaatcgttttgaattttatttagaaaaataagacaggaaatagaaaattatattgaccaaaatgaaagacaaaagtgaaagctagtaaacgaggtgaaagagtagcaagaattgtcagaaatgatgcctcaagcagattcatgaggcatcgcttgacagtagctatctgaacaatcattctgcttcaccagcaagtaatgacaacacaaattcgatctgtttctcaggaaatcggtcgttccacatagctgacagggccgtgtgcgatctctagttgtccttgtaacagatctgttagatcggcttctaccgcggacaaggatatttcgggaaccatcagcgttactcggattttatccgtatagtcaatggatgctaagtgaatgttttggtgctctaagtgattttgcagctttcctagctgaggataatcgatggtcaaataaagtgtctggttaagtgtcccttcaacgataccgatttcctttaaggcagcggcaacagtgcttgcataagcgcggatcaaaccgccagcgcctaatttcgtcccaccaaagtaacgggtcacaacagcaaccacattgattaattcattttttttgaggacatctagcatggggacaccagcggtaccgcttggttccccatcgtcgctgcttcgttggatctcattgttctcgccaataacaaaagcactgcaattatgattagccttccaatgctcttttttgagagcgaggatgaatgctttggcttcctcttcggaagtgacacgtttaagggaacaaatgaatcgggatttcttgatttcttgttcactttgtccatcctcacgaatggtgcgataactattcttcataggctcctccttttattttcagtataggtaatgtggagaaaagtttcaatgaaagaaatcagtaaagaataagtgaacggataaaaaaggaggcgttgccattgagtaaacgcaagaaatacgatatcatcactcattacttaaaatctaatggcggttctcaagtcacattgactttcacacaatttgatgaactgttatttccggcgacagggctgccaaagagtgcccgcaagagcattgattggtgggccaatgattatcgacatccggaaaacggtgcctatgcgtggttgaatgcaagatatgaagtggttcacgtgaatttaaagaaggaatatgttgttttcaatcaattggtcaagtccaattggttaatagacagtaagcgttgacaaatttgaaacttgttctatactaggaataggtaatgttatattatttaaaattttagggagtgttcgatatggctaaaaaaacgattatgttagtttgttccgcaggaatgagcaccagcttattagtgacaaaaatgcagaaagctgctgatgcaaaaggtcttgatacagatatttttgctgtttccgcttcagaagcagatcaacatttagaaagcaaagatgtgaacgttttattattaggccctcaagttcgtttcatgaaaggcgattttgaaaaacgtttagcaccaaagggaatcccattggaagttatcaacatggctgactatggtatgatgaatggtgaaaaagtgttggatcaagcattgacattgattggtgaataagcccaatccattttcaacgattacttaagactattgagtagaaccttacaggtttcgaatttctctgttttggcagaaaatgagaacgagtaaggttctttttttgtggatggcgtactttaattgtgtcgaatgtccaaggctttcgaaaaaactagcgaatgtacctgcttttgaaggcttgatcagtcatatataacgagaggagggatacgatggaagaaggcggtcgtcaaattttagtatccgaaagggaacgcaacaactccgaccaactcaaaggtgacattcgtccagccgtcttaatcaaagagggacaaattgaatgtcagcgttgtggcagctgcttcaataaagaggaggtacaactgccaacagggattcactattgccctgcctgcatccattacggacgggcagatacgtctaaagtttttgtgacagtttcggaacaaagcagcgtcagttttccgaaaattcattggcctggtccactaacggtttttcaaaaaagaatctcacaagcgttggtaagaaattatcaacaaaaaaaagcaacgttggtttggtcggtaaccggctctggcaaaacggaaatgatttttgaagtgatacaagcggcaaggctgcaaggacatcgggtagctgtcgtctctccgcgaatcgatgtgtgccgcgaactgttccctcggatccaacaggcatttcccaaagaatcttgtttactgctttacggagattcagaggaagactatcggtatacagacttgcttgtggcgaccattcatcaactgctgcatttttatcgggcatttgatctgataatcgttgacgaagtagatgcttttccttatgaaggggaccagcaactaaggttcgggttaatgaatgcactgaaagcgaccggctgtctgatttatctaagtgccacaccttcagatgcgttactaaaagaaacaacaaattttgcagtggaaaaaatgccgctgcgttttcatcagcgaccgctgatcgttcctcaactgatttggtatgaaggttggcgtaacgtgtatcaaacaaaaagaagactacggcgcttattgtttcatctgcaacgcctatctcaaacaaattttgtcttagttttttgcccaagtattgtttttatggaacggctagaaaaagctgttcgatcattcttaaaagaggagacgataaccagtgtttcagcaaaagaccctgctcgaatagaaaaagtagtcaaggcgcgcaattcaaagtatcagattcttttcacaactaccatcttggaacgaggtgttacctttgaaaatgtttctgtagtggtgatgggagcagatcatcctgttttttctaaatcagcactggtccagattgctggacgagttgatcgaaaaggtccattcaatcatggagaagttctctttttctatgatcaagcaacatcagcgattcgtaaggcgatcttggaaatccaagcgatgaatcgattagcaaaggagtggctggcaagtgaagtgtagctggtgccaacaggagtttgcacgagaactgtggctgcgggagattttatggccattaggaattcctgcttcagagaagtgtccagactgtaggagtaaattgcagtttgttgatttgactagctgctgcaagacatgttgtaatgaaagccaaaattgtcgggattgtcgctattgggggcaacgttatccaaagtttcagctacagcatcgtgctctgatgacatacaatcaaggaatgcaggagtggctccatcaatacaaattaatgggcgattttcgtctgcgagctacctttctcccagagatcaagcaagctttcaaaggattgctctatgatctggtcatcccgatccccctttctcatgaacgctatcagcagcgtggctttaatcaagtgacagcagtattacaagctgccgggattgattaccgatccttactaaagaaaaagatccatttacctcctcaagcagcaatgactagaaacgaacgattagcagctccacaaccatttattatcgaaaagggtcaagaaatcaaagacaaacgtgtgttgctggtggatgatgtgtatacgactggacaaacaatttatcatgctgcagaagtacttttgacttgccagccgaaaacgatcacgtccttttcttttgccagataaggaattgtaaacgcttaaaaaaatcttagcgattcgctttccaaatgcaagatacttcgatataatagagttaagaagaagaagagagtggtccttttccttcttagtgtggtagacgaaaggggtaatttttatgtttagatataatgtacgtggcgaaaatatcgaggtaactgaagcgatccgcgattacgttgagaaaaaagtaggtaaactagagcgttattttaatgatgtgcctgaagcaacagcgcatgttaatttgaaagtatataccgaaaaaacagcaaaagttgaagtaaccattccgttaccattcctagtcttgcgtgcggaagaaacttctcctgatctatatgcaagtattgatttggttgttgataaattagaacgccaaatccgtaaattcaaaacgaaaatcaaccgtaaatctcgggaaacagctttagtggctccagacaatggcgacttattcacaacggatacaaacgaagaagaaaccaatggagcagaactagacattgtacgtacaaaacgtctttctctaaaaccgatggatagtgaagaagccgttttgcaaatgaatatgctaggacataacttcttcatttttgaagatgccgaaacaaacggcacaagcattgtttatcgccgtaaagacggcaagtatggattgatcgaaaccgattgatcaaagaatgacttgtcgaaaatccccaaaaaagtcttttttgacagagcagagtgatctgctctgtttttttgaataaaaaagctgtgataaaaggggcagttaaacaaaatgattcgctgagtgaaataaaattgccctatcaatcctgcaggtgtaaatccgatctgcgggatcataggggcaatttcatggcctttcggctgctgtgtttgctaaagtctttttgacatagttctttgctgagaaatcaataaatcgttggtactaaaccaccgtcgagtctcaaggcggctccagagaaagaggatgcgtaaggactagcaacgaaagctacaaagcgtccaatctcttctggacgaatgagccgttgaatttgagacagtgggcgatgctttttcatgaaatcttcttcccacatggactccggcaaatcactttcttgatacatcgttttcagcatcgtttctacgccttcggtcagtgttgaaccaggcatgatcgtatttacagtgacctgtgtcccagcggtgagttttgacaaacttttagccaaagagaggttcatcgtttttgtcatgctgtactgcggcatttctccagaaggcataacggcttcctcgctggcaataaaaatcacacggccgaagttttgttggagcatatgaggcaaataaaattttgctaaagcatttcccgacaaaacattcacatggaaaacatgttcccaaacttcatcggtaatttccatgtaatccattggttcgaagatccccatattattgacaagaatatctactttagggaagtggtcaaaaagctgttggcgagctgctgcatcggctagatcatatggagccacttgaggattcgtcttaggaaatttttcttttaattcagcaacgaaagctctgacactgtccttttgccgtccattgacgatgacatccgcgccttcttttgccagctcgaaagcaattgctttcccaatacctttcgtagagccagtgaccagtgctgttttctttgttaatcctaattccatttccttcactccatttccttagttaaagttaaattgatccggatcgggacctacccggtgatcttcattcaaacgattaagttcacgcatatcttcttccgacaaagaaaaatcaaagagttgctgattttgttccattctgtcgggattaactgtcttaactaccagtaaaatatcttgctggatatgccagcgtaaggcgatttgtgcaggggatacgtgatggcgttgagccatctttacgaggattggatgttggagaatctgaccttgcatcaatggagaccaagcttggatcttgattccttgttgctgacaataatcacgcagttctttttgagctaattttggatgtagttccacttgatttaacacaggtttgacttttgctgtagcgagcaatttcttcaaatgatggctctgaaaattgctgacgccgatggctttgatctttccagcttgatggaggtcttcaagtgcccgccaagattcttgatacgcatttttgccaggccagtggagcaaataaaggtctaaataatccaattgcaaaagcgcgagggacttttcaaaagccgcgatcgtttcatcgtagctcaaataattgttccaaactttagaagtgacaaagagttcttctcgtgtaagtcccgttgctgctagtccttctttgatcccttggcctgttccgctttcattatcatatatttgcgcggcatcaatcaaacgataaccttttaaaatgccgttttttacaacagtagctacttcttcatcaggaatttgaaagacgcccaaaccaaagccaggaatgctgacttgttcgttcaatgtaattgtgtcggttaatgaatgaatcatataaatttcctccttgatttttggtaaatataccttatactaaaaaagttcagatgaatagtacctacttttttgtgctatagtgtcaaaaaagtaacttttttgaatttaaaggaagtgtttaaagtatgactccaaaaaaatacaacattggtgtggaagctactatggatgtgatcggtggaaaatggaaaccgattattctgtgtaatctgcgagatggcgccttgcgtccgagtgatttgaagcgacggatacctgatatcagtcaaaaaatgctgacgcagcaactaagagagctggagacagacggcatcgttttgcgaacctcttatcaccaagttccaccaaaggttgtctattctctcagcgactatggtctgacattaagcagcgtattggatgctctctgtcattggggagaaatgcatgtttcaacattgaaagaacaaggcgttgaagtagcgttagctagtcaagaggcgtagggaagatcaaaaacaaaaactagcaatcgtcgagtcgagagtcactcagcgattgctagttttgcttaaaaaaagtgaggtaggaagagggttatttcactgaaccggaagtaattccttgtacataatatttttgcatatagataaagagtagagtgattggaatagcgatcagcacacagccagctgtaaaggacataaacaacgaattggctgttgtttttgtcatcatagaataaagtccgatcgcaacggtatagtttttgacgtcatcacccatgatgattcgagcaaagatgaaatccatccaaggacccatgaaggccatcaaagaggtatagacgataattggttttgataacggcaatgtgatcttggtaaaaatatgccatttattggcaccatcgatcatggcagactcatctagcgccattggaatcgtatcaaagaaccctttggcaacgtagaatcccagtgccgctccagccgaataaaccaagatcagcgctaataagctttgtgttaggttgagggcttttagaatataataaacggcgatcatgctcataaagcctgggaacatattcaataccaaggcaactttcaagaaaggtttacgaagtctaaagcgcaaccgagagagagagtaggccattgcgattgtaataaatgtggacaaaagacagctgcagacagcaacaaacaatgtattcaagaaccagcggacaaaagggtagctgccgctatcattggctaatagttgtcggtaattttcaaaagtgaattctttgggaatgatataaggaacgaaggccccaccttctcctctaaaacttgtcaaaatgatccaaacgatcgggaataaccaaagaacagaaagaatgatcaaaatcgtataaatcagaaaacgggtttttgactgcccttgttggtagccggatttctttttctttacagacattgttacccctccttataagaatttgttcgcgtgtacgcaaacaggctaaagacagcagataagataaagatcaagataccgattacggaagctaaattgtaatccatcgtgttgactgtcaagttgtacagccacgttactaacagatcggtcgagccagcaccatagaaattagagttagatgggccgccgccagtcaataagaaaataacattaaagttgttgatgttgccgataaactgttgaatcaatgcgggcatcattacaaacaatatctgaggaaatgtgatggagcggaaaatttggaatttattggcgccatcgatttcggctgcttctagttgttcctgatcaagattttgtaagattcctgttgttacaagcatggttgctggaatcccgatccacatgttcacaaagataatgctgactttcgcaaagaaaggatcggtcagaaacgggatcgaagaagagatccatccccaattcagtaagagtgagttaatcggaccagaaccgtttagtaagttacgcatgatcaaaagtgacacgaattgaggaactgccatcgtcaaaacaaaaatggtgcgccacaattttttgtaacggatccctttcgcgttgatcaacaaggctaagatcacgccgaagaagaaacaagtgatcgttgcgagtacagcccatgtcaatgtccaagctagtactgggaaaaaggtggacgccatatcaccagtgatgacattagagaaattcttcaatcctacccaagtaaacagattttttgggggtaaatttttgtgatcataattggtgaaggcaatcgaaatcatatataagagcggtaagatagtaaaaaataagacaccaatcaatgggattgtcatcaatgttgcatgaaagcgttcgttcaccagactatgtaaatcgtcgcgtgtcgtagggattttaagtccttgttgttttaattcgtacaaatgacgggcgcttttcaaattaatgatatagagaataatcaagagtgcacaaacgagcagggaagcaataccgaaaagcaataagagcattgaattgtcacctttttgcaagatttcaataccaagtgcttcgttatagaccaacccttgtttttgtgttcctaatgtttgcagcatcagaagagcgtggaaaccatttcttatgaaccaagcgataaaaccaacttgtgatacgatgaaaataattcctttcagccattgtttattggcgaaattagcgcttcccatcaaaataaaagatagttttgtcgctagatcgccttttttgaataattctctaaaagtgatatgcgacgcatgttttttcctgaacatatcctctcaccttgctttcgtaattaactagaaaagggaaagcaggctttccctttgtcatgtatagtgatgtgttgttgattattcggttacttttgaaatatcggaaacaaacttatcgagtttatcttggaactgatctggtttgatttgacctttataggtatcgttgattaacgcatccattggtggccagaaagaaaccatctcaggcaatttaggcattacgacagagtgttctgcatcagacatttccatcacagcttttgctactgcatcagcttttactgcatcagattcttgtgcatctttatttgaagggacaacgccgttttcagtaaattcgatttcttgtgtttcttggttgcttaaatattctgctaaagccatagctgctaatggcgcttcggtttgttggttgacagcataaagttttacacctaagaaagctttcatttgtttcgcaccactgccgaagtcgatcgttggataggcggcaacacccatgttgtctccaagcgctttttctacgtcattttttgaccaaggacctgaaaggaaggcatctgatttaccagattgcaaatcagacaacgcggattcactggcttgaaggacaccgctattatttttttgatcggcgatccattgtaagacttcaacaccagcttcgttgttgaaattggttccattaatatcttcaccgtcttctccataaagaacatttccgttgctcataaatagagggccaaaaatgtagtttgcaccgtcttctgcaaagttggtaccgatttttccagcggaagtcaatccttcccaagtttttacatcatctgctgtcaatgtagaagtattgtaataaagcacttgagattcaacaccgtaaggatagccgtaaattttgtctttccaagtcacggcatcaactgctgcttccacgttcgtatctttgattgttgctgcttgcttatcaccgattggataaatcagaccagcttcagccatttgtcctacttggtcatgaggcatcatgaatacatcggctgcttgttcagggtcctttgagacgtctgctttggcatcggcagaagagccaactgcaactgttacttttacatcaggatactctttttcaaatttgtcgacttgcccttgtaaggcatcaatatgttcggtatctacccataatttaatatcaccttcgacttttgcactagactccgctgcactgccattgcttgaagcagcatcgtcgttgctgttgccacaagcgcctagtacgattgcagacaagcttaaaatacttcccccaataagtaatcgttttacatctaccttcattcttgttcctcctaaaaattaattgtttgcgtttacagacctaattatgcaatcgattgcaataatagtcaagcagaaaatgaacaacttttttggttttctattgcttataagaaaaattaagaatcagtccaacacaaaacctttctacaattggaatgataaagtcgaaattttcaggaaataacttagttattctattcacatttgaaaagcgaatgaaaatgtggcagatcatttttccgtccgttgtaaagcaaacgattgctttctgtttcagagattgttttaaggagcaagagaagtagagtttcttttggacacaagaagcaatgggcgtaaaagaaatctatttaaaacaattgaaaaaagaaaaaaagagttaaaaaaatcatggagaaacatgaactgcgccgaaaaatatttcctttatgatgaactagtgataaaatagttaggagagtttccagttaggaaaagtagaaataaaaggagaattatataggcatggccaatttttttagaaaattaatcgagaatgataaaaaagaattaaaacgtcttgaccatattgcttcacaagttgaatctcatgcggacgaaatggccgctttatctgacgaacaattgcgcgaaaaaacagatgaatttcgcggtcgttttcaacaaggtgaaacgttagaccaattattgccagaagcctttgctgtggttcgcgaagcggcaaaacgcgtcttagggctgtatccttaccatgtccaattaatgggggggatcgtgcttcatgacggaaatatccctgaaatgcgtaccggtgaaggaaaaaccttgactgcgacattgccggtttatttgaatgcgttaagtggtgccggtgtacacgttgtaacggtcaatgaatacttggcaacccgtgactctacagaaatgggtgagttatataatttcttaggattgactgttgggttaaacatcaattcgaagacagcagaagaaaaacgggctgcatatgcctgtgatatcacctacagtacgaataatgaactaggctttgactatttacgcgacaatatggtggtttaccgccatcaaatggttcaacggccattgaattatgccatcgtcgatgaagttgactcaatcttgatcgatgaagccagaacaccattgattatttctggacaagcagaaaaatcgactgcactatacaatcgggtcgataattttgtgaaacgattaaaagaagaagaagattacaaaatcgacatccaatcaaaaacaattggattgactgaaaaagggatcgagaaagccgaagaaacatttggcttggaaaacttgtatgatatcgaaaatacagcgttgacccatcatatggaccaagcgttgcgggcgaattatatcatgatccgcgatatcgactatgtcgtacaagaaggcaaagtcttgatcgtcgaccagtttactggacggatcatggatggacgtcgttattctgacggattgcaccaagcaatcgaagcaaaagaaaatgttgagatcgaagatgaaaccaaaacgatggctacaatcactttccagaactatttccggatgtacaaaaaactttctggtatgactggtaccgcaaaaacagaagaagaagagtttcgtgaaatctacaatatgcaagtcattcagattccgaccaatcgaccaatcgttcgtgatgaccgtgcagatttactttatccaacgctggaaagtaagttccacgcagtggtgcaagatatcaaagaacggcatcgtaaagggcaaccagttcttgttggtacagtagctgtagaaacttccgagctgctttcaagcatgttggatagagagaaagtccctcatgaagtactgaatgccaaaaatcactttaaagaagctgaaatcattctgaacgcaggacaaaaaggtgctgtaacgatcgcaacgaacatggctggtcggggaacagatatcaaattaggcttaggtgttgctgaattaggcggattagcggtcatcggtacggaacgtcatgaatctcgccggattgataaccaattacgaggacgttctgggcgtcaaggagacccaggggtttctcaattctatctttctttggaagatgatttgatgaaacggtttggttctgagcggatcaaagtgttcttggatcggatgaagattgatgaagaagatgccgtgattcaaagtaagatgttgtctaaacaagtagaatctgcgcaaaaacgagtagaaggtaacaactacgatacccggaaaaacgttttgcaatacgatgatgttatgcgtgagcaacgggaagtcatctatggtcaacgtcaagaagtcatcatggaagagcaggatctttcacaaacattgatgaatatggtcaaacgatcgattgaacgagttgtcgatagccatacccaattagaagaaagcaattggaattatgaagggatcgtcgactttgccggaaatgctttagtgcatgaagattccatctctgttgatgatatcaaaggcaaaaaaccacaagaaatcaaagactatctctatcaacgggcagaagaagttttcgagcagaaaaaagcccaattaaacagtcaagaacaattgttagaatttgaaaaagtagttattctgcgagtggtggatacgaaatggacggaccatatcgatgcgatggaccaattaagacagtcagtcggtctgcgggcatatgggcagaacaatccattggttgaataccaaactgaaggatacaacatgtttgaagatatggtgggagcgatcgaatatgaagtgacacgcttgtttatgaaagccgagattcgccaaaatgtacaacgagaacaagtcgctcaaggagaagctcaagaaactgaaacagtcccagaagaagatcctagtttcaaaaatgttggccgtaatgatccgtgtccttgcggcagtggcaaaaaattcaaaaactgtcacggcaaaaaatagaagaattgatacgttaggaaaaaggctggcagcttttcttgtccagccttttccgttcatttacaatacgcgtgaagaaagaaggaaatcaaatggaaatcgcagatatccggaatcaattgaatcaaatgaatgaaaaaataaatagttttagggggtctctttgacttagatcagttagaagaggcaatcgctgaagcagaacaccagatggcggaccctacgttttgggatgattctgagcaagcacagaaggtgatcaacgagaacaatgccaataaagaaacctatgatcagttcaatcaattggcagaagaatttgaagagttggaagttcttttggaaatgatccaagaagaaccagatgcagaaatggaagcagaactagcagaacgtatccaagctttgaatgaaaaaatgggaacttatgaactgtctatgctgttagatgaaccatatgatcgaaacaatgcaatcatcgaactgcatccaggtgctggcggcaccgagtcccaagattggggcagtatgttgttgcggatgtatactcgtttttgcgagcaacatggatatcaagtcgaaacattggactatcaggcaggagacgaagccggaattaagagtgtcactttgttgatcaaaggccataatgcttatgggtatttgaaatcagaaaaaggcgtccatcgcttagttcggatttcaccatttgattcagccaaaagacggcatacctctttttgttcggtagatgtcatgccagagctagatggtgcgattgatatcgaaattaatagtgatgacttgaaaatcgatacttatcgagcgagcggtgcgggcggtcagcacatcaataagacggagtctgctgtacgaatcacgcacattccaactggtaccgtagtggctagtcaagcacaacgttcgcagttgaaaaaccgggaacaagcaatgggaatgttgaaagcaaaactttatcaactagaagtagaaaagaaagaacaggaagctgcagcgcttcgcggagaacagatggagatcggttggggttcacaaattcgttcctatgtctttcatccgtattccatggtcaaagatcaccggactaactttgaaacaggaaatgtacaagcagtaatggatggtgatttagacggctttatcgatgcctacctcaagttgaaattaaatcaaaaataactatactgggctattaaacagattgaaatataattgtaatctgttgaaagcattgtgaaatatattcatgctataataagccagtatgaaaaaaagtgagatggagagatagctgcatgattgaaatgaaagaagtaatgaaaaagtactctaatggtacgactgctatccgtaatctttcgatttcaattgatcaaggtgagtttgtttatgtcgtcggaccttccggtgcagggaaatcgacctttatcaaattgatgtatcgtgaagaaaaagcaacgaagggtgttcttaatgtagcagggtatgacctgttgacgatcaagaatcgcgaagtgccattgatgcgccgcgaaatcggtgttgttttccaagattataaattgcttccgcgaaaaacggtttatgagaatgtcgcttatgcgatgcaagttattggccgcaagcctcgggaggtcaaaaaacgggtaatggaagtattggaccttgtaggattgaaacacaaagtacgagtcttcccaagtgagctttcaggcggagaacaacaacgggtttctattgcacgagcaatcgtgaataccccgaaagtattgattgcagatgaaccaacaggaaatttagatcctgagaattcttgggagatcatgaagttgttggatcggatcaatgcacaaggaacaacagtagtgatggcgacacacaatagcacgatcgtcaatacgattcgtcaccgtgtaatcgcaattgaaaatggtcggatcattcgcgaccaagcggaaggagaatatggttacgatgattagaacgtttttccgtcatctccttgagagtattaaaagtttaaaacgaaacggctggatgacgatcgcgtcactcagtgcagtcacgatcacgttgacgttagtcggtatctttttgggtgttattttaaatgcaacgaagttagccgaagacatccgtaagaatgtggatgtttctgtctttgtggatatcggaacagaacaaaaagacatggatactttggaacaatcgcttaaagaattaccgaatgtttcagacgttcgtttttcgagtcgtgatgatgaattgaaaaaaattcaggatgcgatgggggattcttggaacttattcgaaggggacagcaatccgctttataacgtatacgttgttagtgccacagatcctgaatacacgaaaaaaattgcaaaacaagctggagaattgccaaatgttttcaaagcagactatggtggcgattcttctgacaagatctttgctctatcagctgcggttcgtacttggggacttggggctgctatcctattgatctttgtggcaatgttcttgatttcaaatacgattcggatcacgatcttgtctcgtcaaagagagattcaaattatgcgtctggtaggtgctaaaaatggttacattcgctggcctttcttcttagaaggcggctggatcggattgctgggatcaattgtccctatcgctattatgtattttggttatcaccaagtttacttgttagtcaatccagcactgctacgttccaattatagtttgattgcaccaaatcagtttctactgcaagtttgtggtgtcatggctctgatcggaatcgtgattggttcattaggatcgatcatctcaatgcgccgtttcttaaaagcgtagaacgtgttattgaaacagatctgctgactagcaggtctgtttttcatttgccgacacctttactttagactgcaagttcgctattcttttaggagaggtgagggttggtatgttagttatggataacctgttcacgatcattttcttcgtgaacattttgttgtcgattgtgattatttttagagaaagacggcaaacggctcagacatgggcgtggttgcttgttttattgtttataccagtcgtgggatttgtactctattttttctttggtcgcggaatctccaaagaaaaaattttcgatttgaggacacaagccaaaattggtttgaacgtggagctggaagagcaaaagcaagcgctgcagcggaatctttatccccatccgcccactgcgcaagtagaagtcaaacagctcgtttatttattgacgatctatggtcagtcgttatataccactacaaatgaaatgactctttataaagatggtcgaaaaaaatttgatgcattactcaaagatattgaaggcgccacagatcatatccatatgcaatattatatttatcgcagtgatacattggggggagaagtacgagatgctttgatccgtgcagccaaacgaggagtgaaagtccgtgtgcttttggatgcttggggcagcacccaggtttcactgaaattcttcgatgaattacgggttcatggcggtcaagttgcgttctttttcccgttgttcgttccttatctcaatcctcggatcaattatcgcaatcatcggaaaattgtcgtgatcgacggcaagattggttataccggtggtttcaatgttggaaatgaatatttaggtgaggtggaaaaatttggttattggcgggataatcatctgcgaattttaggaccagctgtttactcactacaaaaccggtttttgatggactggaattcacaacatgctatcgaaatcaaatatgaagcagcgttgtttccaatgatcgaaacaaacggaacgattgctgcacaggtagtgactagcggtcctgattcagaacacgaagagataaagataacttatttgaagatgattaatttagccaaaaaagaaattttgattcaaactccctattatattcctgatgaatcgatccacaatgccttgaaactggcacttttgtccggtgtttctgttcatttgcagatccctaataaaccagatcatccacttgtctattgggcaacttactcttttgctgctgagttattagcctatggtgcagtggtagagacttatgagaaaggttttatgcacgccaaaacgatgattgttgacagtggggtcgtttcgattggttctgcgaatattgatgttcgttcgtttcgacttgactttgaggtcaatacagttgtctatgatgcaaaagttgctgaggaagtgcgccaagcattttttgctgactccaaggattcagaggaattgactttggaaaaataccggaatcgccgattgttgatcaaggtcaaagagggattagcacgacttgtttcgccgcttctatagaaactatttagtaaacgtaggtgaaagttgggtaacaaaaaaacagcagtaatgctgaagcacctcttctaacgtttgttttttggatcaacgttagaaggtgattcatgcaactgctgttttttattatttcatgatacttgtgtaggctgccagaaaaactgacccgactgtcaaaataagcattgtccaaataactacttgagtgattttggcgaaggtgctttttggttttttttcgttcatcgtgatccaccttttagattgatttctagtcacagtttacctccaattaccaaagaactcaagctgctattcttataaattaagaaatcttgaatattttgcaagagcacaaaaagttttttcaaagattctcttgttgaagggtggttgttctgttttaattagtaaagatatagagaaaaaataagtagaaaataagcaggatgcttgagtaaggaaagtaaaagattgcagactgtcttattggaccgcggatttttaaacgaactgaaacatagatgtaaagaaaataaagtatagttacactagctgttagaaaggatttgtttgtatgtctggatttgggcctgctgttttattttggtatatctttccattagtcgttttttttgcttgcagatttttagtttctgcgttgtctttgaaagaacggtttggactgaaggcacccgacttagctgtgccttttttggtgattgggattcatcagttatcaaagaatacttttgagcaatcgatcactccctattatttgatctctatcttattactggggattctcttagctgtctttcaagcgtattattacgaagaaatccagtatggcagatacatcaaaatgtactggcggagtatctttttgtttacattgattttccatgttgttttgatcattttaaatatcgtcacgtatttgtaatttgtgacagggagaacccttatcccatcgagatttttctgcttaaagtttttttaaaaactttttaagagaaagaaactcctgttttttcgtttggtaaaaattagtcaaagaacttcacttttaaatttcacgttaaatgtggtagaaagtgggggattgtggtagactgtgattatcaggtggagatcgggggttatttatcgatgtttatgggtgaatttcaacattcgatagatgcaaaaggccgactaatcgttccttcaaaactgcgagaaaaactcggagaaaaatttgttgtgacacgtggattagatggctgtttatttggctaccccttatctgaatgggaaaaactagaagaaaaactgaacgaaatgcccttggcgaagaaagatgctcggacattcgtacgtttcttttattccgctgccacggagtgcgagatcgacaaacaaggtcgtatcaatattccggcaaccttgcgtgaacacgcgtcacttataaaaagctgcgtgatcatcggcgtttccaaccggattgagatctgggatgaagcgcgttggcaagcatttaccactgaagcagaagaaaattttgatgaaattgctgaaacaatgattgattttggcttataggaagaggaaagcgcatggcagaatttcaacactacaccgtaatgttgaaggagacagtggacggtttagctattcgtccggatggaatctatgtcgattgtacattaggtggagcgggtcatagtgaatatttattgtcccaattatcagaagagggacacctctacgcatttgaccaagatcaaaaagcgatcgatcatgccaaagaacgcttagcgtcttatgtggctaaaggaatggtcacgtttataaaaagcaatttccgctatttaaaggaagctttgcagcaacagggtgtcgatcaagtaagtggtgtgttgtatgatttaggcgtttcttcgccgcaattagatgaagcggaacgtgggttcagttatcatcaggatgcaccattagatatgcggatggatcagtcggctgctttgactgcttatgaggtagtgaatcaatttgattatcaccaacttgtaaaaatttttttccgttatggagaagaaaaattttcaaaacaaattgctcgtgaaattgaacggacacgagcaaataaaccaatcgaaacgactggagaattagtcgagattatcaaaacagcgattcccgctccggcgcggcgcaaaggcggacacccggccaaacggatcttccaagccattcggattgctgtgaatgatgaattaggtgtcattgaagaatctttggaacaggccatcgatttattggaaaaaaatggacgaatcagtgttatcactttccattctttagaagatcgaatcgtcaagtctacgttcaaagcttacagcaccccaaaagatgtgccaccagggttgccgatcatccccgaagaatttcaaccagtactaaaattaattactcgaaaaccacttcttccctctgaagaagaagtatctgaaaacaatcgttcccgtagtgctaaactgcggatcgcggaaaaaatgaaggaaagcgaaggttagcaattatggcagaactaaaagttcatgattatgaatttgaagaaacgtctgaacaagagttttatgctcactctgaaccgacaattgaacagctgccaagcgaacctgagcgtcctgaggttatccgtgtaccagcatctcctgctcgccggttaaaaagtatctctaatttagaaaaactgattgcagcatttgtgatcattgccgttttgacattagcgatcctgacgatcaatattcggactacgatcagtcaagtcgaacatgatatttcactgatccaatcagacatcaatgaaaaaaatagtcaagcagaacaattagagcaagaaagaaacgaactttctaaaactgagcgtatcaaaaaggttgctgaggataatggattgtcgatcgatgatgacaatttaaggaaagtggattaaatgaagctaacagataaattcaagcaatacttgaaaaagaaaaaccaaactacaacgaacaatcgcaaaaaagtaggtattattctctttgctacgagtattggattgttctttttgtttgtcacgcgtttgagctacattgttatcgtaggtaatgtggcaggtacttcattggctgagaaaaccaagagcctttatcaaggaagcgaagttgtcaaagcaaaacgcgggacaatctatgatcgcaacgggatcgcaatcgcagaagatgcaacttcttattctgtttatgctattttgtcaaaatcctacgttagtgggaaaaagaatttatatgctgaagagaagaactttgataaattagccaaaattctgaatgagcaactaggtattgatcagaatgaggctgtgcaaactttggaaaaaggtctaaaagaagaacgttggcaagtggaattcggtagccaaggaagtaaaatgacgctggagaaaaagacagcgatcgaagaagcaatgaaaaaagaaggaatcgctggcctttattttacagatcatccttctagaatgtatcctaatggaattttctcttctcactttatcggctatgctctagcagaaaatgaggagaacgactcttctggcttagtaggaaaaactggtttagaagctgcttatgatgatgtattatccggaacagacgggaaaatcgtctatcaaaaggataacaatcaaaacccgctaccgggaacggtggcagaatcagtggcagcggtagatggcaaagatatctatacaacgattgatagccggattcaaagctatttagaaacgctcatggataaagtgttcaaagaatacaagccagaagatctgactgccacattaatgaatgcaaaaacaggagaaatcgaggcgatggcacaaaggccaacctatgatcctgatgatttaagtaccatcaaaacctggcagaatttattggtcgaagacaactatgaaccaggatcgaccatgaaagtcttaaccacagctgctgctatcgatcaagggatattcgatgaaaatgaaacttttacaccaagtccggacggattgaaactgtatgatgcgacaatcaatgactgggactttggtcaaaaaggaacattgacgatgcgtcaagctctttcttggtcaagtaatattgggatggttactttggaacaacgaatgacagaccgttggcaacaatacttgcaacagtttggatttggtcgcagtacgtactcgggtctgccaaatgagaatactgggatcatgccggaaaataatccggtcagtcaagcaatgacttcatttggtcaagcaatcggtgtgacgaattttcaaatgatgcaggcttttaccgcagtcgcaaataacggcacgatggtcaagccgcaatacatcagcaaaatcgtggacaatgaaacaggtgaagagactgtaacacagccagaagttgttggacaccctatcacggaacaagcagcgacgaaagttcgagaatatatgcgtgatgtggtagaaagtgaaaactacggaagtgcgtatggtgtctatagtgtacctggttacaatatttcagcaaaaactgggactgcccaagtagctgatccaaaaactgggaaatacttatctggggattccaattacttgtactcaatcgtagaaatggttccttcagaagaccctgaatacattctttatctaacaattaaattaccagaacaccacgacagcgaagcattggcaaaaatcgccaatccgttgatgaaacgcgtgatggatttaaagaaagcaacattagaagaaacagcaacagaaaatagtcagaaagtaaccgtcaatgattatcgtaaattagatacaactaccgcggcaactgatgtacaaaaaattggtctagcacctgtagtattaggggatggaaaaacagttatcgatcagtctgtggacagtggatcgaaagtactgccaggagaaagacttcttttgctaacggatagtgacaaaatttatatgcctgacaccaccacatggtcaaaagctgatttagtcaaattgggcaacatgttggatgttgatgtcaaatttgagggcgacgggtattgtgtttcccaaagtcttgcatcttatgaggaaatcacggatcaaacaattaccttcaaattgagcgaaaaagaatagggagagaacactatggaatggacagagatgatattgccacttgccagtagttttgcaatcgttactgctgcaatgccgctgtttatcggctattttcaaatgaaaaaatacggacaagagattcgaggagaagggccaaaatggcacaatgtcaaagctggcactcctacaatgggcggcttcgtatttttgattgcggcattgatcacagcagtttgggttggcgcatggcaaaagcagttgaccgcatcgctgttcattttgttatttattatcttggtttatggtgcgcttggattcttggacgatttcatcaaaattttcaagaaacgcaacatgggtttaaactctttacaaaaattgatcggacaaatcatcggtgggattgtcttttatctggtctttttatcagaaggcaatgcgaatgttttgaatctctttggatttgagctgccgctatcgatcttttacggcgcatttgtgattttttggttagttggcttttcaaacgccgtcaacttaacagatgggattgacggcttggttgctggactcggtacgatctcatttgcaacttatggcctcattgcttggcgtcaagatcaaatcgatatcctgatcgtctgcttagcggtcattggaggattgatcggcttcttcccttacaatcgtaaaccagctaaaattttcatgggtgatgtgggctcccttgcattgggcggtcttttagcagcagtttcaatactgcttcaccaagaatggacattattacttgtcggacttgtctatgtgattgagacagcaagtgtcatgctgcaagtcgcttctttcaaattgactggtaaacgaatttttaaaatgtcgcctattcatcaccattttgaaatgagtggctggtcggaatggaagatcgatacaattttttggctgattgctttaggatgttcgatcatcacattagtgattgtatggtaggagagaggaatcatatgaaaaatataaatgaatatcaaaataaaaaagttcttgtgctaggattagcaaaaagtgggttcagtgcggctaaattgttacatgatttgggcgcgcttgttactgttaatgacggaaaaccctttgccgaaaatccagaagcacaggatcttttggcgttaggcgttaaagtaatcaccggcagtcacccaattgaactactggatgagggtttttcacttgtggtcaaaaatcctgggattccttatgatcagcctattgtccaaaaagcgatcgagaaaaatatcccaatcattacggaagtagagttagcttacaaaatttcggaagcaccgatcattgggatcactggaacgaatggaaagaccacgaccactacgatgatcgctaatgttttaaatacgggatttagtgaaggccgggcattgttgtctggaaatattggctttccagcaagtaacgtcgcccaaaccgctagcgctaaagatcgcttgatcatggaactttccagcttccaattgatggggatcgaaacattacatcccaagattgcagtcatcacgaatatttatgaagctcatctagattatcatggcaatcgatccgaatacgtgcgggctaaatggcggctgcagcaaaatatgacagcagaagattttctagtcatcaattggaaccagccagaattagtcgaactttctcaacaaacaaaagcaaaagtgattccattctcgacacaacaaaaagtggccggtgcgtatctttttgaagagcagttatatttcaaagatgaggcaatcatgcctgtttctgaactgggcgttcccggcagtcacaatgttgaaaatgcattagctgcaatcgcagtggcaaaattagaagggatagcaaatgaggctatcgttcaagcattgcatacatttagcggtgtacctcaccgtactcagtatgttgatacgattgaaggggttcgctttttcaatgattcgaaagccacaaatagcttggcgacagagatggctttaggtggtttccaaaaggatcagttgattttgttggctggaggattggatcgcggcaactcctttgatgagctgattccatcactgcaagatctcaaagcgattgttttgttcggacaaacaaaagagaaacttgctgaagccgcacgtaaagcaggaatcaaaacgattaaattgacagaagatgtaactacagctgttcctttggcttatcaattaagccaaccgggagataccgttttattatcaccggccaatgcaagctgggaccaatacccgaactttgaagtacggggggataaatttatggcggcagtagcagaacttaacagaaatgagcgaagtgaatgaaaatactagtaactggcggtggaaccggcgggcatatttatccggcattgtcttttgtcgattatgttcgttccattgatccaacagctgaatttttatatattggggctacccgtggattagagaacaaaatcgttccaccaaccgggattccttttaagacgttagaaatacaaggctttaaacgaaaactttcattggacaatgtcaaaacagtccaacttttcctgaaaagttatcgtgaagcaaagaaaatactcagagaatttcaaccggatgtagtgatcgggacagggggctatgtctctggtgctgtggtctacgcggcatcagtacttaagatcccaacgatcatccatgaacaaaatagtgttcctggaatcactaataaatttttgaccagatatgtggacaagattgctattgcttttcaggatgcagcacactattttccggataagaagacggtcttggtggggaatccccgcgggcaagaagtaaaaaacagtcagaagtctgcgatccttgcttcctatgaccttgaccctaagaaaaaaactgttttagtctttggcggcagtcaaggagcactgaaaatcaatcaagcgattatcgaagcaattccgctttttgcaaagaaagattatcaactgttatatgcttctggtgaccgttattaccaagaaatcgaagagaagatcggtatgtcgaaagatgcctttccaaatatcagcattcgcccctacatcgatcaaatggcagaagtcatggcgaatagtgacttgttgatcggacgagctggcgctacatcgatcgctgaatttactgcattgggattaccagcgattttgattcctagtccttatgtgacgaatgatcatcaaacaaaaaatgcgcaaagcttagtcaatgctggggcagtcaagatgattgcggacaatgagttgaacagtcaaaatctaattgagtgtgtcgatgcgatcatgagtgatgaaaacgtacggatggaaatggcaaaggcgtcgaaagagcaaggaatcggtgatgcatctgagcgactatttcgacttgtgcaagaggtaatcaaatagtacaatgtgttggatagaaaggagagattgtcatcagtaaagataagaaatctcatgataatcaaaccacccccacgacagaagaattgaccccttggcagaaagaaaatctgcgttatcaaaaagaaaaaggcgatcaacctgtatggtcaccctctgtcatttccgggattcactcagatgaagaacaatcagaagaccaaacagaagaaaagcacgaagaaggcgcagagactgaagattcagaacaagctccccgctcttttgctgatcgattgcccaatttaaaaaaataccgtaatcgagtattgttgcgccgattgctgttgattattggtgttttgctgatcccgttgttatttattctgtattacgtctccccgttgagtaagttagcggatgttaaagtcgtgggcaatgatcaagtgtccgcccaatcaattattgaacattcggaattaacgactggagaagaaatatggccgcagtattttgacagcgaacaaacggaacaagccatcaaaaaagcgttgcctcgtgtcaaaaatgttcaagtgacaatcacttctttaaaccagttcaagattcgggtatcggagtaccaagaggtggcattgctagcaagcgataatcattattcacctattcttgaaagtggtgtcgtggtcaatgaaccgagtgaccagcctctggaaggactacctattttagagagcttttcagatcagtcaaaaatcaaagaagtactgactgcttatcagaagctcagtcaagagattcgtgaaggaatttctcaaatcaagtacacgcctcgggacagtaatgacgagttgttaacgatctatatgaatgatggtaaccaagtgattgtgaacatttcaaatatggctagtcaaatgcagtattatccgcaaatcgcaaaagatttgaaagaagacagtatcatcgatatggaagtgggcatctttacctatccgatttccaatacaaaagacagtgactcggcaacagaacaatcgaccgaaggggattcttaggaaaaattcaagagtttttttcattaacttgtttctaaaaatcgctattatatggtagaattggtaacagtgaacaaattattctaattagatataaatacgaacttttcaaggttcgcgatatatgcaaattaagtaggagggaaccccatccatggcaaaaacgggaatgtatgttggcctcgatattggtacgacatctgtgaaagttgttgtagctgaatacgttgatagccaaatgaacattattggtgtaggaaatgcaaaatcagaaggaatcaaccgcggaatcattgtagacattgacaagacggttcaagccatccaaagagcagtaagacaagcagaagaaaaagcgggtatccaaattcgcagtgtgagcgtgggtgtgccagccaatctgttagaagttgaaaattgccaagggatgattgctgtcaacagcgaatcaaaagaaatcacagatgacgacgtgcgtaacgtagcatcagcagcgctcgttcgatctacacctcctgaaagacagatcattgccattttaccgcaagagtttactgtggatggctttgaagggatcaaagatcctcgcggaatgatcggtgtccgcttggagatgtttggggtagtttatacaggccctaaaacgattttgcacaatattcgcaaatgtgttgaaaagtccggcttgattgttaacgaacttgtaatcacaccactagctttgactgaatcgattttatcagatggcgaaaaagattttggtacgatcgtgattgatattggtggcggtcaaacaacaacttcggtaatgcatgacaaacagttgaaattcacccatgtcaatcaagaaggtggagaatttgtaacaaaagacatctctactgtgttgaatacttctttcaataatgcagaagcgctaaaaatcaattatggtgatgcttatcctgaacgtacatcggcaagcgaagaattcccagtggacgtcattggtaaatctgaacctgtcaaaatcgatgaacggtatcttgctgaaatcatcgaagcacggatggagcaaatctttaataaatcaaaagatgtcttgaatgaaatcgatgcgtttgaattaccaggcggaattattttgactggcggagctgctagcttacctggcgttgtcgatttagcacaggaagtcttcgaaacaaatgtgaaattatacgtgccaaaccatatgggattgagaaatccggttttcactaatgtgatcagtatcgttgattattctgctaatttaagtgaagtttatcagcttgctaaaagcgcgatcacgggtgaacgtacgacgcaacaacctgttgctgttcaacaagagatttcttatgagcagtatgaggctccagaagaaacttatgaagaaccagaagaagagaagaaaggcgaatcgatcacgaatcgtgtaaaagatttcttctcaaatatctttgaataatctaaaacgatactcaggaggaagataaactatggaattttcaattgataacaatatcaatgatggcgctgtaatcaaagttatcggtgtcggcggcggcggcggcaatgctgtcaaccgtatgatcgaagaaaacgttaaaggtgtcgaatttatcgctgccaatacagatgtgcaagcattgaaaaattcaaaagctgaaacagtgatccaattaggccctaaatatactcgcggtctaggtgctggctctcaacctgaagttggagaaaaagcagcagaagaaagtgaagacgcaattcgtgattccttgcaaggcgctgatatgatctttatcactgccggcatgggtggaggtaccggaactggggcagctccgatcgttgcaaaacttgccaaagaaatcggtgcattgacagtcggcgtagtaactcgtccattcacatttgaaggaccaaaacgcggccgtttcgcagctgaaggaattgcaaaactaaaagaaaacgtcgatacattattgatcatctccaacaaccgtttattggaagttgttgacaagaagacaccaatgctggaagcattccgtgaagcagacaatgtattgcgtcaaggggtacaaggaatctctgatctgattactgcaccaggctatgtcaacttggactttgctgacgtgaaaacagtaatggaaaatcaaggaacagcattgatgggtattggtgttgctagcggcgaagaacgtgtcatcgaagcaacgaaaaaggcgatctcttctccattgctagaaacatctatcgatggtgcagaacaagtcttactgaacatcactggcggattagacatgactttatttgaagcacaagatgcttctgatatcgtagcaagtgctgcaacaggcgacgtaaacattattctaggaacttcaatcaatgaagacttaggagatgaaatccgtgtgactgtgattgcaacaggtatcgatccttcaaaaaaggaacgctcttctcgtacaagcagacaaagtcaaatccattcaattccacaaaaaccaacgttagatatggatcaggcgaaaccttcacacgtagaagatgatcatggctttggtgattgggatattcgtaaagaacaaaacgttcgtcctaaagtagaagaaagccaatttgagaatgttgaaaaaaaagaatttgatacattcaatagagatgaagtaaaaacaaatgacgacgatgaattaagtacaccaccattcttccgtcgcaaacgctaggaggcagagcacatgatttctgagaacttgcacaagatccagcaagagatccaggattcttgtgctcttgtttctagaaaagcaagtgaggttcgtctggttgctgtgacaaaatctgtcgatagtgaaaaaacacggaagatcatcgaagccggtgtcactgactgtgcggaaaaccgagtagaaaaactcctggaaaaaaagcagcaactagcagactttccagaagtaaactggcattttattggtaatttgcaacgcagaaaggtaaaatcaattataaatgaagttgattatttccatgcgttagaatcgctgaaattggcgcaagaaattcaaaaacgagcagcaaaaacgattgcttgttttgtagaagtcaatatttcaggtgaagcaagtaaacaaggaattgcaccagacgacgttgtttcatttattgaagagttgcagccctttgataaaatcaatgtcatcggcttgatgaccatggcaccacttgcttcttcagaagcagagcagctcaattattttcatcagttgaaagaattacaagaaaaaatcgcagcgctgcacttggcacatgctccatgtacagaaacaagtatgggaatgagtaatgattttgccgttgcgatccaagcgggtgcgacagttgttcgcatcggcaccgcattatttcaggagtaaaggaggttgacatatgtctttaaaagagaaattgaccaatttttttggattgacagatgaagaagattattacgaagaaagcgtggtagctcaagaatctgtgcgatccccgcaaaatatcgccgtcaatcaaggtagttcttatgttgcaccacgcacgactcgtgctgaaaatccaacgaatacattttcacgaagccatatgccatcacagcaagcgcaagcgcagcgttcaacagcatcaagtgcgtcctttgaaagacaacaacgccctgtccagaagacagaggaaaaggtcgtttctatggcccaacaacgcagtaatcccaaaacaaaagaaataaagtccaaggctgcaggcaagattactatcgtagaaccaagagtttattcagaagcgatgggaatcgcgaaacaagtgatcaatggcgatgcagtacttgttaattttcatttaattgaggagtaccaagcacggcgaatagttgattttttgacgggaacagtgtacgctgaagatggcgatatcaagcgtgttggagatgaaatcttcttatgtacgccaaaaggaatggagatcgagggaactgctcaaacattagcagatagtaatttcttcgatatctgagtcaaggaggaaagcatattttagtctttaggttattaaatctattcagtgatgcagtatatctctatacagtattattagtgatctatgccttgctttcttggtttccgggaggataccaatcagcatttggacgtttcttagcaaaaatctgtgaaccatatctaggtttgtttgatcgtctaaatctgagtttcgctggcatcgactttacgattgcatttgccattatcgttctgcagctagcaacgcaaggtctgttcgttcttctacaagcaatcttattctaacgtaaggggtgaatatcgatgaacgcaaatgtctatcagcattttcgaagcgatgagcacccttttattgattctgcgcaaggctggatcgaacaagtgcagatgcaatacgcaccctatttaacagattttcttgatccgcggcaagcctatattttagaaagtctgattcggcaatcaaccgatttgagttttcaattttttggcggatatgaagctgctgaaagaagacggtgcctgatctacccagactattaccaaccagcaagtgaagaatttgatttggtattattcaccattatctatccaaaaaaattcacggttttaagtcatgggaaggttttaggaacgttaatgggcacaggggtcaaaagggaatactttggtgacatcatttctgatggggaaaattggcaagtatttgtggcaagcgaaatcagtcattttgtccaaacacaggtcgataaaatcgggaatgtctcagttcgcctcgaagaaacgaagtacacggaattgatcgtaccaaaagacggctggagcgaagaacgagaaacggtcagctctctccgtttggatactgtcatttctgctgtctataatatttcgcgccagcgttccaaacaactcatcgagtctggcaaagtgaaagtcaattggacagaaacattacgtccggattttatgttggatctactggatatcgtatcaatcagaggatttgggcgtatccagattcaggggttagaaggcacgacaaaaaaagaaaaagttagattgttattaggtgtattacgtaaataaaacaaagaggtgtaaacttatggcattaactccattagatattcaaaacaaaagcttttcagtaaaaatgcgcggttacaatcaggatgaagtcgatgacttcttagatatgatcgttcgtgattatgaagaagctgttcaaaagaaccgtgaactagaaaaatcattgaagcatgcagaagaaaaacttgagtatttcaatgaattgaaagatgcattgaaccaatcgatcatcgtggctcaagataccgcagacaaagtaaaaacgagcgcaagcaaagaatctgaagtgatcgttacttctgctcaaaaccgtgcagatgaattagtaacgaatgccgaaaaacgcgctcatgcattgacaacagctgcagaagaaaaagccaaagaaattctgacggatgcaaccaataatgcgcgtcaattggcaactgaaaccaatgatttgaagaagaaaacgcgtgttttccacaacaatcttttggttatgctgcaaacacaattagagcaagtaaaaagtccagaatgggaagaaattttggcgccattttctagctatgtaaaagattctcatcaagtaatcaaagaagttttatcaaaagaacttgacagcgaaaatgattctgaagtaaactcagaagcagtggagagtccagtagaaatcgtggaatccagtgagaaagaaattgatgtagaagaaaatccagaagtgaaaacattggatgatgcacgtcaattactagatgaattaaataaaacaaatgactaatatacagaacagaaaaatttcttatacttttaaagcgagtctgggagagtggaagccggataaaaccctgtaagaaattagatcatctgttagtcttggtcttgaacagtggtagagtccaacgtttgatctcgttaccgatcaacaaagaattgtcactgacaataaaatttgggtggtaccacgaacacgttcgtccctttccgggatggatgtgtttttttttatagcttcatagcctatgggcttattagaaggatttggtcgattcaatgagtgaattcactgaaattgaggcaggatagacaaaattgtttgatcgacatgtgcttgcacatgccataatcatgagtaatcagtaaaaggagcgaatacaatgaagatgaaagaaacattgcatctgggaaaaacggcttttccgatgcggggaaatttgcctaatcgcgaaatcgaatggcaaaaagattgggaagaacaaaatatctatcaacaaagacaagcactgaacgaagggaaaccaacatttgtcttacatgatggccctccctatgcgaatggcaatatccacattggtcatgcattaaacaaaattagtaaagacattattgtacgttctaaatcaatgtcaggattccgctcaccttatgtaccaggttgggatacgcatggattgccgatcgaacaagtgctgacaaacaagggcatgaaacgcaaagaaatgacacttgcggaatatcgcaaaaaatgcgaagagtatgctttgacacaagtagatacccaacgtgaggactttaaacgtttaggaatctcaggtgattgggatcatccttacatcactttgacacctgattacgaagctgctgaaatccgcgtattcggaaagatggcagaaaaaggctacatctataaaggattaaagccaatctactggtcaccatccagcgagtcttcattggcagaagcagagatcgaatacaaagatgtcaaatcaccttcgatctatgtcgcttttcctgtagcagatggaaaaggaatccttgatgaagatacatctttcgttatttggacgacgacaccttggacattaccagcaaacttaggaatttcagtaaacccaacgtttacttatgttcaaatcatggcagatggccgtaaatttgtaatcgccaaagatttgttggagactgttcaagcagctattggatgggaaagtgttgaaatcttgcaagaaattgctggagaaaaactagaatacatgactggccagcatcctttctatgatcggacttcattggtgatgctaggtgaccatgtcacgctggaagcaggtactggattggttcatactgctcctgggcacggggaagacgactacatcgtaagcaaaaaatacaaattagatgtcctatctcctgtcgatagtcgtgggatgtttacggaagaagcaccaggatttgaaggaatcttctatgataaagcgaacccaatgatcaccgatttgttagcagaaaaaggtgcattattgaaacttgatttctttgtccatagttatcctcatgattggcggaccaaaaaacctgttatctatcgggcaacaccacaatggtttgcttcaatcgatcaattccgtcaaaacatccttgatgaaatcgagaaagtggactggatcattccttggggcaaaacacgcttgtacaacatgattcgtgatcgaggcgattgggtcatctcacgtcaacgtgcctggggggtaccactgccgattttctacgccgaaaacggcgaagcaatcattacgccagaaacgatcgaacatgttgcaacgctatttgaacaacacggatcaaatatctggtttgaaaaagaagccgaagaattattgcctgcaggctttacgcatccgggttcaccaaatggcaaattctctaaagaaacagatatcatggatgtttggtttgattctggttcttctcatgaagcagtcttgcgtcaacgtccagagttgactttcccagctgacatgtatttggaaggttcagatcaataccgtggatggtttaactcaagtatcaccacaagtgtggcgatcaatggggaagcaccttacaaatcagtcttgtctcaagggtttaccttggatggtgaaggccggaagatgagtaaatctcttggaaataccattgctccagagaaagtaatcaaacaaatgggtgccgatatccttcgcctttgggttagcagtgtagattatgaagcagatgtccgagtttcaatggatattttgaatcaagtctccgaggtttaccgtaagatccgtaatacaatgcgtttcttattagccaatacggctgatttcgatccaaaaacggatatggtttcttatgaaaacttacgctctgtagacaaatacatgctggttcgattaaacgaaacgatcaaaaccattcgtgaagatgggtatgagaaatacaatttcttgcatatctataagacgatcatcaatttcttgactggcgatctttctgctttctatttagactttgcgaaagatgttgtttatatcgaagcggaaaatgatccacaacggcgagcaatgcaaactgtcttttaccaaacggcagtggctttgacaaaattgttgacgccaatcattcctcacacagccgaagaaatctggtctcacttaaaagaagaggaagcctatgttcaactagctgaattgccaagttatgaatcatttgcgaatcaagctgagttgcttgatatgtggacggcatttctttcattccgtgacaatgtcctgaaagcactagaagaagcacggaatgaaaaactgattggtaagtcattggaagcaaaagtgaccatctatccatcacaaccgctggcagacctattaacggctgttgatgctgatttggcccaattattgatcatttcaccagacttcttcgaaatcaaagaggcaggaagtgccgctccagaagcagcgttacaatttgaagatggtgcaatcttgatcgaaaaagccgatggtgaagtttgcgaccgttgtcggcaagtgcggacagatgtcggagtggatgagaaactgccaacactttgcgggcgttgtgctcatttggtggaagaatattatccagaagccgttgctgaaggctttgagaaataaaaattagctgagaaataaaggtaagccaaaaattatcagtgtgccgttggacgatctacttagatcgtccgatggcacacgttttttgtgatcatttcattgtgctgacttagttatcagcttttgtgtctttttcattgttttctcctagcaatagcaactagacgacagcaactgatgataagaagcatagaagtgacaaaaatgcagcgctaggcaatcgtgcttgctttgtcccaatcggttttacccgttcagcgtttttgagagaaagctagaccaacttgcagaaaaagattgcaagatttacatagaaaaggtaaactgttaaaaattggaatattcagaatatttaaagaaaggatgaggggatgagggaaaaagagacattaatgtatgatcctcgttttgaaagtgatgcttgtggcatgggctttatcgtacaaaaagatggattatactcgagaaaactgattgaaaatgcgttgacgatgttagaacgaatgaatcatcgtggcggaacaggagccgaaccagatacaggggatggtgctggtgtgttgatggcattacctgatcctttttttcaagcaattgctttagcggcagagattgttttaccgccgaaaggtcactatgcagtaggcatgttttttttgccgcaagaacgagaatccgcagtcaaattaagaaaggccgttgctcaggatattcagcaaatgggatttcgggtgttgtggcagcgggaagttccctatgactattcgcaatgtggtccaggagcacaaaaagtgatgcctagtttttgtcaattctttattgaaaaacctctcgatgtgacagtcggaagagattttgaggaccgtttgtatcatttgcggcgacaattagaaaaaaactatgcagcccaggaactagccatctgcagtctttctagccaaacaatcgtctataaaggcatgttacatgcttatcaggtcggactgttttattcggacttacaagatccgcgtatgacttccagtatcgcattgactcattctcgtttttcaaccaatacttttcctagctggaatcgcgcgcagccttttcgttttttagcccataatggggaaatcaatacgttaagaggagccgaaaattggatgcatagtcatcaaatcgaagtctatgatgaggaaaattcggactccgcaaaacttgagaattgcatggaattcttgtatcgccaagggagagatttacctcaggcgcttttgatgatggtacctgaagcctggtcgaaagaagccggtttgccagaagaactagttgcttttcatgagtacaatgctagttttatggcaccatgggatggaccggcagcgctttgttttacggatggtgagctggtgggtgctgctttggatcgcaatgggttgcggccttcccgctattcaattacgagggatggcttagttgtcgtagcatccgaatcaggggtggttgatctacccgcagcagaggtaattgaaaaaggggttttaggtccagccaatatgtttttggtcgataccaaaaatggcttgattttgagaaataaagagatcaaagaaaaatatgcgcaagctcatccttatcgcgaatggttgacagaaaatttgttaacgatggatgacttaccagaaccccctttttctgatggattatcgacagagacactacagcggttatggaaacttcacgggtacaccgacgaagtcatccggacactgctgatccctatggctcagacaggagaggaaccggttatctccatgggatttgattcaccattagcaatcttaagtgaacgtccccagtcgctttttacgtactttaagcaactattcgcacaggtaacgaatccaccaattgacgcgattcgcgaaaagctagtgatcggtacagaattatttctgggacgagatggcgatgttacaaaagatcttagccaaaattgccataaattaaaaatcgctagtccgattttaaccacaagcgagtatctgaagatcaaacatctaagtcagaaacaacaatcggcggcagtcctctctactctttattttgtgactggcaatgagcagcaaacactgcaccatgcattggatactctttttaaagaaagtgaagccaaaattgatcaaggggctacgattctcgtgttaagtgatcgcgaacccattgcaccacaactaggtaagatggcaattcctgtcttgttggctgtttcgggtttgcataattacttggtgcgaaaaggaaagcgagcgcttgcctcactcattgttgacacggctgaagtctgcgaagttcatcactatgctatgttagttggctacggtgccagtgggattcatccttacggggcttacgaaacgctgcattattatgacatgagtgatcatgtcgaaaattatcgacaggcctgtgagaagggactcataaagattatgtctcgtatgggaatttcaactattgccggttatcatggtgctcagctctttgaagctgtcggtatctcaccacaagtcactgaggtttattttacgggaactgtttctcggattggcggcctgtcgttgaaacaaatcgaacaagagtattttgagcgatacgaagctgcctatggtgaaaaacaacaggattatctagattcgggaggcagctttcagtttaaagcagaaggtgagcatcacctttttaatcccaaaaccatctatcactttcaaaaagcggtgcgcacaggagattatcagttgtacaaggagtatgcagctgtcatgaatcaagaggctttaagcacacccacgacacttcgttcactatgggagttcacaccttcgcgtcagccaattccattggaggaagtagagcctgctgtccaaatcgtcaaacgattcaaagtaggagcaatgtcttatggatcgctaagtgaggaagctcataaatgtattgctgaggcaatgaatgccatcggagctaaatcaaatagtggagaaggcggggaacatcgcgagcgtttcaaagcggtcaacggcaaaaattacaatagtcggatcaagcaagttgcttctggacgttttggagttaatgcggagtatttaatgagtgccgatgagttgcagatcaagatggctcaaggagcgaagccaggtgaaggcggtcaactgcctggaaataaagttttcccttgggtcgctgagattcgcggatcaacccctggggttcgcttgatttcaccaccccctcatcacgatatttattcgattgaagatttggcacaattgatccatgatttaaagaccatcaacccttatgcgcgaatcaatgtgaagctggttgccagtacgggtgttggaacgattgcaaccggtgttgtcaaggcaggtgctgatgttgttgtaatatcaggctatgatggcggtaccggtgcttctccccgcaattccatcagagatgcgggcttgccttgggaaatggggttagcagaagctcatcaaacattggcactcaatcatcttcgtcagcggatgaccttagaaacggatggtaaattgatgacgggaagggatattgcgattgcggcacttttaggtgctgaagagtacagttttgcttcattggcccttgttgcgatcggctgtgtgatgatgagagtctgcagtctgaatacttgtcccgtgggtattgccacccaaaatccagctttacgaaagttttttgctggtaaaccggaacatattattcatactatgtttttcttagcagaagacctcagagaaatcatggcagaactgggttttcgtaccattgatgagatggtggggcacacagaagtcttggtacctcgtttcattgccaaagggaaagcaaaatcattggatttcgctcgcatcttgggtacgacacttccgattgcacgtaaagtgacggatccttttttggagaaacgacaatggccagaattggatagttttgccaaagcagcaattgaaaaacaacatcctgttgctatcagtcaaccgatcaacaatattcaacgttctgttggtgcccgcatagggggatggattgcagaacgctttgggaactatgaacttcctccaggattgctgcaattcaattatcaaggaattgcgggtcaaagttttggtgcctttgcaacgcaaggacttgagctgagattggttggagaagccaatgattacgtagccaaaggattgagtggtggccgtttgatcattgtaccgccagcagatgctagttatgatattgaacagtcgcccattgtaggtaatgtggcttgctttggggcaaatcgaggagaaggatatttcagaggtctggcaggagaacgtttctgtgttcgaaatagcggagccaaagtggttgtagaaggaatcggcgatcatggctgcgagtatatgactggaggtgtcgctgttattctaggcaagacgggccgcaattttgctgctggcatgtctggaggtgtcgcctatgtgtatgatccggagcaagcgtttgctgctcaatgcaatttagaaatggtggaattgtttaaggtagatgagagcggggatgatgcggtattgaaagaattgatcgagaaccattttgcctatacagattccttaaaagcagccgagattctaagcgattggctctatcataagcagttgttcatcaaagtttatcctaaggaatatcatcaaatggtggaagcgactcatcaattggcgcgacaaggtctctcaggagatgaactgatcgctaaagcttttgagtcagttgtcggtcctcagatgacgatcccaggaaaggagcatgactagtatggcagatccttttggtttcttaaaataccctcgaaaagaaaatccgtatcgtccggtagcagagcggatcactgattggcaagaactgcaagaaccattgccggcaagtgagcggcaagaacaagcagcaagatgtatgaattgtggcattcctttttgtcataccggttctttctatggcgggcaacggacagtttctggatgccccaacgataatttgattcctgaatggaatgatcttgtttatcaaggcaggtttcaagcggcttttgaacggttagcgaaaacgaatccattacctgaaatgaccggacgggtttgtccagctccttgtgagaaaggctgcacggaggcactaaatgggagcggggtcacgattcatgacaatgagcgtttcattatcgacactgcatttgagaatgattgggtccgagcatcgggagaaccgcaagcagcaactggtttcaaaatcgccatcattggcagtggaccagctggtctatccgctgcttggcgcttgaatcagttaggtcatcaagtgacggtttatgaacgcagtgatcgttgcggggggttgctgatgtatggcatccctaatatgaaactagataaaacagtggttcagcgcagaatcgatttgatggcagaactaggcgtgacgttcctaacgaatgtcgaagtcggccgcgacatttctgctgaagaattagaagctgcttatgatcgtgttattatttctactggcgccagtgttccgcgggatttaaagatcccaggaaggtctttgacagggattcagtttgctgttgattatttgacagcagcaaccaaagaggtattgaaccatggaaaagctgcgaatgaatccttggcaggcaaacacgtggtcgtgatcggcggcggagataccggaaatgattgcttagggactgcgatgcgccatggggctgcttctgttcgtcagttggaaatcacgccacagcttccaccacagcgtttagctgaaaatccatggcctgaatacccaatgacagctaaaatcgggtatggtcaggaagaagttgctgcggttctacaggaacatacgtatcacagcatttcgacaactgcttttgtaggagcggaacggggacaggtgattgggatcgaaacagtcaaagtagatgagaattttcagccaatctctggtacagagcaagtgatgaaagccgatttagttttgttggcaatgggcttcttaggtccagaaacacacttgttagacaccttcaatgtccgtgaaatctatgatgattatacaaccaataatgaacgggttttagtagctggtgatgcaaaaagaggtcctagcttagtgatttgggcaattcgagaggggcggctcgctgcggagaaagtcgatcaatcgctgagggccttgatttatcaacaaatttagcaaaaacaacgggaaaaatgcgacagataagacaaataaaccgaaggctatctctgaaaagcgatgcgcaatcttgcgcgaaggacgaatcgtccaagaagcttagcaggtatccttcggttttgttgaatctttcgtcacatagcagatactttgtactgtgcccgcggtccgccgatatatttggggcgtgagcctaatgcagtcacatgagctgcacctaacgttttgatacttggccgaatagggatctgtacgtgtttgacatgcatgccgatggcagtatcaccaatatcgatgccagctttcgcaacgatatgctccacttcaacgggatcaacaaacaagcgaaatgccgctacagaacaagcacctcccgcatgaagtgcagggacaactgccacttcttctaattgataatactgagcagtgctacgctctacagctaatgcacggttcaagtgttcgcatccttgaaccgctaagcgaatgccaagcggatccaacacctctttaatggtcttaataatgatgtagcctacttcttcgctggagtttttgccgatcatcccgccaacgacttcgctagtagaacagcctaaaacaaataaatcattttgcgttaagtgtgctgcgtcaattacttcagttgtgatggttactaagtcatttttaagttgatgaaaatcattcattggaatcttacctctcattcaaagaaaatttttgtgttcgttttaaataattgacaagcggaaatgctaccaatataccaaaaacattttgaacgctattgctgagaatcgaagcaatgcctgctccaaagccaaacatgatggtcgttgctgcggcatagcctaaaatcatcgtcacgcttcccaaacaaagtgccagcaggggatagtgacgaaaacgaccagtaatgtagccttggcagccatggatcaaaatagaaaacaatgcccattctggataaccggacaaaaagtcgatcattccgccgctcaagctgccgacgatcgcacctgaaggaccgcctaataaaagagccgtggtatagatgccggcttcgcaaagggtcacgacaccttttgtctgaggaactggcaggacaaataataaagaaagagcggtagtcagtgctgtcagcatagctaaccttgttagtttcttggtagacatgaggtaactcctttcctaaaataagcaagttgatcgacatttcctaaagattctgtcagctgtagcccattttcaatgccggcaaaaacaaagtctttggcttgctgtacagcatctgtcattgagcggtcagtagccaagagcgcagcgatggcagcggataacgtacaaccggcgccgttcgttgtctgtttgggtgattttggtgtctcaaaaaagaaaaagtcatccccatcatagagcaggtcgcaggcttgctgcccgttcagacgagcgccacctttgatcaacacaaaagcaggcccaagtgctttgatttttttggcagctatcttcatttcttcccgagtagtaatggcttgatttgcgaaatattctgcttcaaccaaattgggagtaacgatagtggctaaagaaaataaggattgcagggcgtgttgatactcttgattggcttttgtctgtccttctttaaaagctaagactggatctaagatgatcgggcagtcttgggtcactaggaaatttttcactaattcgatcgtttccagtgtatgtaataggccgattttgatggctgctaaacgggtgaaagctgtaactgaagctaattggtccttcagcgttgcaggagggatatcataaatggtgatttcctcattgatggctgcgacacaagtgagcaccatgtgaccaaaggtattgaattcttcaaaggtcttgatatctgcagtggcaccaccacctgctaagctgtctaagccagcaatggtcaatacttgtttcattgattcacatcctttagtctttcgttttattatagcgaatggagcaaaaataaaaacagccaattggctgtttttttacccatccaattggctgctgcttattgattatttagtaagttccgttcacgataccattcatctggtttccaaatccattcaaagccatcagctgctaatagatcataggcggcttttggtcccatggtccctgctgaatagttcggaaaatcaggtgtttctttatcccaagcatgtcggatgacatcgacgatgcgccatgattgagcaacttcgtcccaatgagtaaagttggtgccgtccccattcaaagcatctaagagcaatttttcataggcttctggcgtattttctacgatttcagtactattgcggtaatctagtttaacaggaagggtgtcgaatccttgaccgatttctttgccatttagagaaagtgaaaagccttccgtcggttgaatataaatcgtcaagacattaggtgctaatttcttcttgctttcgcaatcagtcacatctttcttgaaaacattcactggaacttgcttgaaaacgatattgatacgggtgcctttctctgttaaacgtttccctgtgcgtacataaaaagggactcctgaccagcggaagttgtcgatcaaaaacttgcctgcgacaaatgtttcggtggcagaatcttccgcaacattcatttcttcacgatacccagcaaactgctgatcctctaattgcccgtgagcatactgtccgcggacaaaattggttttgacttcttcttctgaataaatgcgaatcgcattcaatgctttgattttttctgtacggagttctttttctgagaaagcgactggtggttccatagctagcaaagagagaatctgcaagatgtggttttggaccatatcctttaaggcaccactcttatcataatagccgccgcgttcttcaacgccgagatcttcagcgatattgatttgaacattgtcgatatagcggttgttccattgcgattcaaaaatattattggcaaaacggattgcagaaatattttggatcatttcttttcctagatagtgatcgattcgatagatctcttgctcactgaaaacttgattgatttcttcgttcaattgtttcgcagaggcatagtcacttccgaaaggtttttcaatcaccacacgatggtagccttcggtttcaagcatgccttgtgattttaaatgtgagacgatggtaccaaagaagtttggagacattgccagataaaacagttggtttccttcaagctgatacttctgatctagagaatctgcaagctctttcaatgagtcatagtgagtggtatctgtcacatcatgagactgataataaaaatgtgaagcgaaagtctcagcttgttcttttgactcgatcaaatcttcgatcgttcccataacaacttcacggtaatggtcatctgaccaaggacgacgagccgtaccgattacagcaaaatcctctttaagatcgccttttttatacaaacggaagagggaagggtaaagtttgcgttgtgcaaggtcaccggttccgccaaaaatagtaaaaagcacctttttttccatcgttttcactccttacaatttatctacaaaaatcgtactagctgctttataactgacagcaatttctttatccgcatttttaatggtgatcggtccttcgtaggcagccgtatcaatgatctcaaactcttcatgaatattcaggtcgatggctaccagatagtccaacaattcccgttcatccaacacgcgagcaatccggatctttgtcccgacagggtaagcactcatcgtcgttttttctccttcgtggacgggttgtccctgttcggggatcattccgccgtgaggacaaaacttaggatgtcctagataggcttctaaatgatcagccaatgtccctgatgtgacatgttcaagtacctccgcatcatcgtggacttcattccaagaataattcaaatgctccactaaaaatacttcccataaacgatgtttacgaatgagagcacttgccgaagctagtccgctttcggtcaattggacgccttgataaggagagtgttccactaagccttcttttaaaagcttagaaatcatctcgcttactgaagcagcagacacatccagaccagaaacgatttgtttgttgttgattttcttctgatcaccgcccaattccaagatgagcttcaaataatcttcgcggtttggtgtcatggtattcatcctctcttatcaaagactatcaaactaaattctatcaaaaaaagccacagattactacggaaaaaaccgtgggaagaaggttttttataaaccgctttactttattcgcttattctgacagtcagtttttttaagaagaagaaaactgagagaatgattcatcctctcagtctttttagtgtgtattaagcccaatcgccatttctgaatactgggactgttgtgccatcttctttgattccatcgatggacatttgggcagatcctaccataaagtcaacgtgtgtttggctgcggttgagaccagcagcggccaattcttcttcgctcatttctgttccgccttgtaagctgaatgcataagccgaaccaagagctaagtggtttgaagcattttcatcaaaaagggtgttgaagaaaatgatcccggattgtgagattggtgaaggatcaggaacaagagccacttcgcctaaatgttttgcgccttcatcaatggctaataattttgctaaaacttcttctccttgttctgcagagaaatcaaccactttcccatctttaaaggtgaacttcatcccagagatgatcgttcccgcatagcttaatggtttcgtacttgagatatagccatcgatgcggcgactatcaggagcggtaaatacctcttctgttggcatgtttgccataaacttttcgccacgggcattgaagctgccggcaccttcccataaatggttctttggcaagccgataataatgtctgtgcctggggcagtataatgcaacgctgtgaattgttcttcgttgagttcattagctttttcttgcaacgttttatcatgattcttccaagctgccacagggtcttcttcatagatgcgcgttgttttgaaaatttgatcccaaagcaagtcttgcgcttcttctggtgttgcatcagggaagactttttgtgcccaatcttgaccagcggctgccacaaccgtccagctcactttgttggcttgggttgcttttcgcaagttaatcatggctttccccgaggcggcttgataagtcgctacgcggtctgaatctacacctgctaatgcatcgggattggctgaaaccacactgatacggctcgcaccttttgctacccaatcgtctgtttgatcgattttgtattgaggaatcgtttccaagcgatcgctgtcggcgtgggcaagaaattctttttgaacgacatcatctgtccattgaacgatgacttctgctgcccctaatgcataggctttttttgtcaaaaggcgagccaaaggtgcttgatcaacagcgatttggatgacgatcgtatggcctttttgaacattgacgccaacttctgtgattagttgggcatatttctcaagattttgattaaaatttggtaaaaccattaaaattcctcctaatttttctaactataactttctctatgatagcactatttttttttgaaaacaaatgaaatcgaagtcaaaaaaacagattttttcatgctgaattggaagcaaatagggactaggacaatcttaaaagttgttttgcaatcttaaaaaaacatgatacaatgaataaaaggtttttctgaaagcgatgtatagcagaattaaggagattaaaaaattatggcaagaaagaaaacaattactagagaccagattttaaaagctgcctatgaagttgtcgcaaccgaaggattcacacgttttaccgcacggaatattgcagcgaaaatgaagtgttcaacccaaccgatttacttagaattcaaaaacatggatgaccttaaaagtgccttgatcaatcaaatttatgattatctagcaacagaagtatttcccattgagagacgtggggacgtgatcgtcgatctgactttgaattacattggttttgcgaataaagaaaaacgcttgtatcgcgcgctttacctggaagagtatggcggtggcgattccatgcaaaaattttcttttgatttattcgtcaaatctgtgaaaaaagatccgaaatatcaggatttaacagaagtcgaactgaaatcattgcatacgggtgtatggatcgttgccactggattagccgcattgatgtcttcgggaattcttcatccgacggaagaccaaattgcaaaattgatgaccgagaccgcagaaaatatcattcatcgagaaacaccgattgatatttcatacaagtcattcgatcaataattaaatcatacgtaaagagaaaaaagcatgtacccagcgtgggatacatgcttttttatgtatgcgcatcaaagagatgcaacgatttttttcgcaaagtcttctaagttttgaatgtcttcttcttcggcagccaaatcaactttgacgctttctgctcctttgatagcaccggtcttggcaaaagctgcttcaaaatcatcgacagatttgcaaaaatcatcgtagaacgtgtcacctgaaccgcaaacaccaaatgtttttccactcaggtctaattcttgcaagtcttcatagaaatcaacgatctcgtctggcagttcaccatcaccataggtataagtggctacgatgcaaatatctgcctcttcgaattcatcggcatctacttgcgtacattcattgatatctacctcaatagccagattttcaagtgcttctgcaacgatatcagctatttcttcggtgttgcctgtcatgcttgcgtaaacgattttagctaaagtcataaataagtcctccgatcctttaacggtcaacagtaaaaaccctctctgattatagcaaacccagtcaagaataacaattcttgaaaaaagtcttaggtgaatcagcagactttgtaaaattcttgctttctatggtaaaataagaggaatttaaataagggagacgagaaaatgataacattaaaatctgccagagagattgatcaaatggctgagtccggcgcattacttgcggacgttcataaacaacttcgtacgtttattaaaccggggatcactagctgggatatcgaagtatttgtgagaaattatattgaaagccatggcggaatcgctgcacagatcggctttgaagattataaatatgcgacttgctgcagcatcaacaatgagatttgtcatgggtttccccgaaaaaaagtattaaaaaatggtgatctgatcaaagtagatatgtgtattgatctaaaaggcggaatctccgattcttgctggagttatgtcgtaggtgaatcgaccccagaaatcgatcgtttaatggaagtaacgaaaaaagcgatgtatttgggaatcgaacaagcacaagttgggaatcgaatcggtgatattggtcatgcgatccaaacgtatgcggaaggtgaaggctatggtgttgtccgtgattttgtcggtcatggcattggtccaacgatccacgaagcaccaatgattcctcattatggcgaagcagggaaaggcctacgcttgaaagaagggatggtcatcacgatcgagccgatgatcaacacaggaacttggaaaatgaagatggatccaaatggttggacagcgtacacacttgatggtggattgagttgtcaatatgagcatagcttagctatcacaaaagatggtccacggatcttgacttctcaaggagaagaaggaacctactagaaaagaatggacggatgtcggaggaaccccaaatgaaatggatcgataaggcgaaaagcaatcaaaagcttatgcgatttatagaaacgacacaaacgcggatcacggaatctgaaatgggaacgacctcagttgtcgtagcctattatttattactatccttgtttccattgctgatcgcgatcggaaacttgctgccttttctttcaatcgctcctagtaacgtgctgccctatgtccaagaattgattcctggtcaagtgtatgaatttatcggaccggccattgagaatttgctgacttctggttccggcggcttgttgtctatttcggcacttgcagctctttggtcagccagccaaagcatcaatgcattacaaattgccatgaacaaagcgtttggtgtcgatcagcgttcgaactttattgttgttcgtgcggtctcttttgtcattattctcttgtttatgattgcaatcgtaggtgtgacgatggttattggtttagggaagatcattttggactttctacaaccaatcttccatattcaagatgatttgattgctaccttccaaactgtcaaatggcctttgacgatcattgcgttgctgtttatcttgatgctaatctactggttggtgcctaatgccaaagtaaaacttcggtcaacgcttcctggcgcagtatttgctacggcgggctggatgttgctgtcgcaagtgttcggcttatatgcccgcttttttgctgctaggatcagcggctatcaaatcatcgggagtttcattgtgttgatgatttggctgaatctggcagcaacgatcattattttaggcggcatcatcaacgcagttgtggaagaatatttatcgggacaagagatcaaagaacgaaaagatcccgtggaacgtatctcatcaaaacttgaagatacattttccaataaggagaaataaatgaaagtgagaatgagcgatggaatttgcatttaaatttattgtacgtcttttcatcacgatgatcatatctttgatattgacgcccatcattaaattgatatcctttaaaattggtgcagtcgatcgcccaggagaacgacgaatcaacaccaaaacaatgcctacagcaggaggacttagtattttcctgtccttctcttttgccttgctttgggaatttcgcgaaatgatcccatttaactatgtctggccaatgctcttaggagccgcgatcgttgtagtgactggtttgcttgacgatatctttgagctctctccattacaaaaggtctgtgggttaacgctagcggctttagaaatctattttgtggcggggatcaagatcagtactgtgtcgattccttatatcggtgtattcgatttagggtggttaggcctgccaatgacaattttatggatattggcaatcacaaatgctgtcaatttgattgatgggttagatggactggctagtggagtatcgatcatcagtttgataacgattgggattatcagttacttctttttgcctgattcagtagctgtttcaatggtgatctttactttagtcgctgccatcgtgggattctttccctataacttttatccagcaacgatttttctgggtgatacgggtgctttattcttagggtttatgatttccgttctctcattgcaagggttgaagaatgcgacgtttattaccgtgatcacgcctatgctgattctgggcgtaccaatcaccgatactgtctatgcgatgattcgacggaagttcaacaaacaaaaaatttcttctgctgataaaatgcatcttcatcatcgcttgctttctttaggatttactcatcggggagcagtattgacaatctatgcgttagcaatggtattttcttttattgcactgttgatgaactatgccagtaatacggcaattattctactgatcattagtaccgcatttgggattgaattatttattgaattgattggtttggtgggagagaatcgccaaccattgatgtgcgccttgaaatttctaggtaatcggcgctttcgtcaggaagttttgactaagagaacaggcgactcactagaaacaaccgaggagccaataaaggaaccaacagaatcaaaaacccctcagcggacctcgcgcagaaaacgacgggctaggcataaaaaataatctcggtccatcagtaaaagaacgatccttacatgacatgttcagttgaagctgaaagtcacgtgtgggtcgttctttttttgtatctatccctaaaaggattgtttgcgcaaatcgattatttcaacgttacgatcgacaacgccagattctgtttctaacataatcgattggaaacgctcatttaaattaagctttggttcttggtcgaaataattggctgtatagtctttgatataaataggtccaaccgcagatgagagagtaatggtgtaaggtgcgggaacctctttgtctgagaccagcaagaaacgaaaacttgtatcgagagaacagatccctaatttcgaataaggtccgacaccgtcatccagatccagcagtaaagcaccctcattgctatgatatccttctagtttgttgatgactgcttgtgacatttttagttccatcatgtgttcctccttctttctcttcaatttcattctaagagcatttccctcagaacaaaagtaatctgctttcagcttattgacgtcttgaggctaaaacgtctatactgaatgagaagttatttcagtgaagaaagaaggatggtcaatgccaagtgtacagcaacgagaaacagaaaaaatgggaacagtttatgaagttgaaaatgatagcggtgtcaaacttgtaacaagcccggaaggagcacgcttactggattggatcgtgccgattgatggcggccgagacttagttgttgggtatgatacgatcgcaggacaccagaaagcgcgttattatggcgcaacgattgggccagttgccggcagaattgcaggaacccgatttactatcgacgggaaagagtatcaaacagaagataatgataatggcaatacattgcatggcggatttaagggattggataccgatacttggaaagctgaaacatttgaaacagaaaccgcagctggcgtaatttatcggacagaacgcaaagacggcgatagtggatttccgggcaatgtttcatacacagtgacttatacattggaaaatgatgattcatttacgattacttacgatgccacaaccgatcagcctacactatataatcccacgaatcatggctatttcaatttgaccggtgacactagaaatccaatcgatgatcacatggttcaaatcaatgcagaatatgtggctgaaacgaatcctgatgtcacaacaacaggaaaaaaacaacctgttgctgatacgaagtttgactttcgtgtagcgcgaaaaatgggcacaacattacttgatgatccattcttattggatcatactcaggactgggacttgaaagtgacgagccctgatgaaaaagtttccatcacagttacaacggatcgaccggctgtagtcatctataccacacgagatggcgaagaaggagcaccaatgaaaaccggaccttttgcaaaccatggcggaatggctattgagacccaaggcgttcctggaacagaaaaatatcctcagtttggggagatcctcttacgtccagaaaaacctttccattctgtgactcgttatcgtgttttttattaatcatagataatatatgacctctgtcagttgatctcaaacactacagaggttttttttgacaattttcgattacggatgtaaacttaaatcgtgaacaagcaaggaggaaaaaatatgcaatcatcaagtgctcctataaaaatcagtgattccgaatgggagatcatgcgagtgatttggacattaggaaaatccgatgcccaagaagtcacggcacttcttagcgaatccaaagactggaaaacagcaaccgttaaaacattactaggccgtctagtgaaaaaaggcgtattgcggacagaaacccaaggaaaaaaatttgtttattatcctttggtttccgaggatgctacgattcaaagtgccacagagagtttattctctcatatctgtgcaaaaaaaatcggccaaacattggcagaaatgattcgtgaatcggaactaacgaatgaagatctaacaatgttggaagaggcactggcgcaaaaagaaccggtagccgctattgcttgcaactgtataccgggacaatgtcaatgtacaatgaatgaaggagaataaatcatgaaaaaaatctatcacattgaaggaatgagctgcgaccactgtgttgctcgggtagaaaaagcattgtctgaagtgccaggtgtcaaaaaagcaaaggtaaatttaaagaaagccaatgccaaagtcaaatatgacgaacaacttgttacagatgaagacatcatcgctaaagtaacggaggtggggtacacagccacggttgaataagtctctcgctgctgttcttgaaagatatggaatgaaaaaagttcatttaattgtttgcggaaagacggtaggcaacttctgtcaccccccaacgcgttccagcagggcgcaaaactttccagcaaaaaggaggagtttgagatgagccataacgaaatggacggaggacattcggaaatggatcacagtaagatggatcacagtaagatggatcacagtaagatggatcacagtaagatggatcacagtaagatggatcacagtaagatggatcacagtaagatggatcacagtaagatggatcacagtaagatggatcacagtaagatggatcacagtaagatggatcatagtaagatggatcatagccacatggatcatggcatgagtggaatggatcatagtatgcatatggggaatttcaaacaaaagttttggctttccttggttttagcaatcccgattattcttttatcccctatgatggggcttgaattgccttttcagttcacttttccagggtctgactggctagtgatgattttagccacgattttgttcttctatggcggtcagcctttcttgagcggagcgaagatggaactgcagcaaaagagtccagcaatgatgacgttgattgctatggggatcacagtctcttatgtctatagtatttacgcgtttatcgcgaatcatttcatgcatggcgcacatgtcatggacttcttttgggaactggcttcattgatcgtgatcatgcttttaggacattggatcgagatgaacgctgtgtccaatgcagggaatgcattgcaaaaattagctgaattattgcctgatgaagtaactcgcaaaaaggcagatggttctgaagaaaagataccactggacacagtgaagaaaaatgatcgtttgatcgtacgagcgggtgacaaaatccctacagacggtatcatcaaagaaggggcaaccacgattgatgaatccgcagttacgggtgagtcccgtagagtagcgaaagagtccggttcgaaggtaatcgggggttccgtaaatggaaatggaacgattactattgaagtaacaggaaccggtgatgagagctatctttcaaaagtaatggaaatggttcgtcaagcgcaggcggataaatcaaaattggaagctttgtcagataaagtggcaaaatggttgttctatattgcattggtcgtcggaattaccgcatttgtaatttgggtgttcgcagcggatttgccaacagcgctggatcggatggtaactgtttttgtcattgcctgtcctcatgcacttggattagccattccgttggttgtcgcacgttcgacatcaattgctgctaaaaacggcttattgttaaaaaatcgtaatgcactggaaaatgcccatgatctagactatttgttacttgataaaaccggtactttaacacaaggaactttctcggtcacaggaattgaaagctttggtgactatacagcagatgaactactagcctatctagcagggctggaacaatcggccaatcatcctattgctgatggcatcttagcgcaagcaaaaaaggaaaatgttcagccgaaggaagcgactggaatccaagcgcattctggtatcgggatcgaagggatgattgctggggagaaatggcagatcgtcaatcaaaaagggatcgaaaagtatcagacaaccattgatccggaccaattgaataaatatcaagaacaagggaacaccattagctacttggtgaaaggcaatcaagtcgaagggctcgtagctttgggagacaaaatcaaaccagaggcggtaaaattcatcgaaacattgaagaaacaggggattacaccagtgatgttaactggagacaatcaagcagctgctaaggcagtggcaacttatctaggcatcgatgagtattttgctgaattattgccagaagataaagaacgaatcgttgctgattatctgaataagaaacaacgggtagcgatggttggtgatggtatcaatgatgcaccaagcttggctcgggcaacgatcggtattgctatcggcgctggaacagatgtcgcgattgattccgcagatgttgttttgaccaatagtaaccctaatgatattctgcattttcttgagctggctcataaaactagacgaaaaatgattcaaaacctttggtggggagcagggtacaatattgtgacgattcccttagctgcaggaatcctagcaccaattggtatcattttaaatcccgctgtcggcgccgttttgatgtcactaagcacaatcgtagtagcaatcaatgctatgacactcaaaattgatgagtgacaaaaaaccgaatcgtttgtttccattgattctcttgtaagcaggagaacgaccgaaacaaactgattcggttttttagtcagttgagaatcgaagattctttggtaatttaacggcaaagccgtcgaaataaacctacaatcgaccagtgactttatgctataatgtgttcgttgagacaaggaggacgttgagaatggaactgaagaagttagaggttcccactacttcgatcactgaagtaaaaaaatctccgatggatgtatttaatcaagcgagagaagcgggaacagcagtatatgtattcaatcgtgaaaaagtggcgggggtcatgctgacacaagagcaatatgaaacactcttacaggaactggatcaacggccattagcggaagaagagccggatcaaccagctgtggcgggattggaagaattcttacagattatgcggcaagcattgatcacaggggcaacgatttctgcaaaaaatttggacgaacgaatggtcgcattaggctttattacccgcaaaacaggctttggcggtgtagttgacatgatcaatgaattaaaagaaaccggaaagattgtctatcaattgcgcaaaaagcccgatggaaaatctgtcagtgccgaagtcatcggcgagcaagacaatcaaacgcagctttttgataaattgatcatcaaaaaaatattccttaaagaaaactaacagttatgctgcagcataactgtttttttgcgtaagtgtaatagtgtgagtttagtcgataccgatagaaataatggctgagacaaaaggtgtgaaaaggatactcctgattaggatcaaaaagtaccatcagataacagctaagtctcagcctttttcagcgacccactaagcaaccgtcaaccaataggttttaccatctttggttcgctgcatgaatccgtattcgatcaaatagcggcgaacagtgacgtagtcagcaataaactgtttcaaaatatcattgacggcactttcggaataatttttctgagaatcaaatttttgagccaaaacactcaataccacgattttgcgtttttccttacttgggaattgatgaatcaccccatcttgatcgaagtatgtcgcaatgattttttctctttcttcgctggtgattgcataacgatcatccaacatggttgctcctgtatggggaagaacaaaatcttgttcctctaaatgtgccataatacttaaaaagactttcgcttgccgttctttttcttttaatttaaagcggtgatttcgtactgtcgaattagagatacctagacgttgcgcgatgacggcatcgctgagtccttgcgcaaataatgataagatctcttgttggctttctgacaaacctgtctgctcgcgacttaatgacagcaatgcattcagtaaaccaccatggacctcatttagatgtaataagatgcattttttggcggtataaaagcgatcagaggttggataaatctgtcctttttcataattaacatcgcagaataggcattgataatgtgtttttgtggaacgatacccatgttcatagtcagacaaagaggtggcgggaatagttttcactttaatcatctccttttgtttgtttatatactaacatttataaatatcgtttgcaaatatataaacagatggattttttattttttgttttagcgaaagtattaaattacggatcaaaatgtgataggattaacagcaataacaaaaggtaactttgtgtggataggagtgatacgatgacagatgtcagtcaacgttttaacaaagaagtctatcaaattgctgtttctttgattcgaaaatttgatgagcgggtatctggtataccagatattttgaaattaacattaggcgaaccggatttcaatacaccggatcatgtcaaaaatgctggtgttcaagcaattgagcaaaattacagccattactcaggaatggccgggttaacggatgttcgagaagccgcaagcctttttttaaaagaaaaatatcaattgagttatgatccgttatcagaagtattagtgactatcggtgcaactgaagcaatctctgcttctttattagcaattctggaaccaggagataaagtccttttgccagcacctatttatcccggatatgagcccgtgattcaactagctcacgctacccccatttatttagataccacagcgaacgattttgtattgtcaccggagatgttggaaggggctttgattgagcatggggatcaggtcaaggcggttatcttaaattatcctagtaatccaaccggcgtggtttattctcgtgaagaagttcaagcacttgcggaagttctgaaaaaatatcctgtgtttgtcgttagtgatgaaatttatagtgaactttcttacgacgcacctcatgtatcgatcgcagaatatttaccggaacagaccattttgatcaatgggttatcaaaatcacatgcaatgactggctggcggattggttttatctttgctcccgttgccttaactgcccaaattatcaaagttcatcaatatttagtaacggcagcctcaacgatttcacaaaaagcagctgtaagagcgttagttgaaggaatcaatgatgctgcagttatgaaagccgagtaccgtcagcgacgtgattttctctatgaaaaaatgacagcattaggttttgaaatcgccaagccgtcaggagctttctatttatttgcaaaaatcccaaccggttatgaacaagattcgatggcattctgtgttgatttagcagaaaaaaatcaattagcaatcataccagggattgcattcggacccgaagccgaaggatatgtacgcctaagctacgcagccagccaagagaacctgcaagaagccatgaagcgactaagtaattatatgaagaaacaaccaaatcaataaacacatcagagcgtcccaatgggacgctcttttgctgcgaatcactgcgattgacactcgaagagtggcagagcagatgatgagcagtactaggcgatcaaagagagcgtagtcacattcaaatgaatcactgcgattgacactcgaagagtggcatgtaagttcgtcttagcgcaaacacgctagaagccagtgcgaagcaaagtaagtgtagccccaatatggagtcataaagaacaacacacagcggcacttgtaccttttgctttttaagaaggaaccaggcaagctcttttcacttcaatgaaaagagaggaacaatgacgagcgatacattttaatgtttacaaaagatttacatgggtttatctattctttactttaaatcaatcatgggtttacaaggggttgctaaactaagcatataacgaaaggagatttaacaaatgaaaaaactgggattcttaattttagcaacaggactattactagctggctgtggaaatagcggatcaaatgctgctgatagcggtcaagcatcaaatgaatcaagtgcttcaggagcagcgtctggaaatgtagaaattttggctgttggatcaactgcactacaaccattagttcaagctgcacaagaaagtttcacctctgaaaatccaaactatatgattactgttcaaggcggcggtagcggcacaggactgagccaagtagaagctggtgctgtaacaatcggtaattctgatgtttttgctgaagaaaaagacggagtagatgctagcaaattggtagaccataaagtcgccgtagttggaatggctcctgtagtgaataaagaagttggtgttaaagatatcagcaaacaggacttgattgatatcttcactggtaaaaccaaaaattggtctgaacttggtggaaaagaccaagagatcgcagtgatcaaccgtgcatctggtagtggtacacgggcaacatttgaaaaatggggacttgacggggccgaaacaattcaaacccaagaacaagactcttctggaacggttcgcaaaatcgttgcagaaacaccaggagcaatcagctatcttgctctatcttatctggatgattctttacaagcattaacgattgatggtgttgaagcaactccagaaaatattgctacaaatgactggaaaatttggtcttacgagcatatgtatacaaatggcgaaccagatgcaaacgtcaaaacatttcttgattacatgttgagtgacgatattcaacaaggtgtcgtgaaagaattaggatacttaccaatcacagaaatgaaagttgaacgtagtgttgaaggggaagttacgaatataaactaagaaactatagttatcaatgaatagtcagagacgaaaagggcaaataaatgccctttttttctgtgtttttatgcttttttcctataaaatgaaaaggagtaaaattgaaaggggaaaaaaatgtcaaaacagacaaaatactttgtatatatttgtgcacttttgccgctactgtttttaggaaatacaggaactgttttagctatagaaattgaaagcagcagtcaaacacttactacagaaacaatgaatgaaacaagtgcctctaacacctcaacgacggatagcacaagtaccgtgtcgtcagatgcagagggagcttcgaataccagtagttcagaaaagagtagtcaagaaagtacaaaagaagaaacacaagcttcagatgaatcacagcaagaaacacaagaagaacccgaaaaaatttatgatgttcaaggtggacttgatccgtcgagcagaaatcgttccgatttgaaagaacaggtgggcattcagcggcgttctctgcgttcagcagacgtcgcgtttattgaagccggagacccatcgactcctagtcaggattttattgatgtctcttctcacaatggcatcattagcgtggaacaatacaagattatcaaaagttatggtatttcttccgtggttgtgaaattgacagaagctacttcttatcgcaatccattagcagcatctcaaattgcgaatgctcaagcggcaggactggtagtacatgcttatcattacagttggttcacgacagaagcgcaagctaaagcagaagccgagtattttgtcaaatatgccaaagaattgaagctgccaacctcagctttgatggttaatgatatcgaggacaatcaaataatgggaaaagcagatcatactgcactttctaaagtatttgccaatcgtatcaaagaattaggctatagtaatacccatcattacactggggtactttgggtcactcaaaaagcgatcgatcctgctgcacttggctatagtaatgtctggatcgcgaattatccgtatgttcctgcaggacaaaaattcacggaatatagtgcatggcagtggacctataatctttctttcccaggagtcagtgggaccttcgatatgtcttctgactatcagaaatactttactggtcaggggcaaggaggagcaataccagacaaccgctacgctacgattacgaaagataactacacgatttggcagaatttttcttggaagaaaaaagcagattcaaaagattatttgggtcaaacgttacaaataaaatatcgttacgagcatatcaatggtagtacgtatttttctgtgtacgataatcaaggtacttggataggttatattaatgctggtggaactaagacaactgatggcgcacaaggaagttggcagtcaaaagaaacgtatgtaaagtttcgttcgaccggaacggtttatcgcaattttaatttcgattccacagcaatagtatcagaagaaatgttgaggaatctttacaaggtaacaggcacctatcgtcattttaatggtgtcgtatatgattcagtatatgatctcaatggtaaatggatcggttatatcgattctgcaaagcttagtgtggagaatcaaggtccagctattagcgacgaacgctatacaacagtcactagtgcaaattactcgatttggcaaaatttttcttggaaaatgcgtgcgtcaagtagttcttatttgcaccagacgctaaaaattaaatatcgttatgagcatttgaacggcagcgtttatttttcattatatgacaatcaagacaattgggtgggttatattaatgcaaatgccacgaaagttgccgacaatgcagcgggtgctgtgttattcagtggacaatacggaacggttactagtaaaaattattcaatatggcaaaatttttcttggaaagaaaaaaataaaagtgctaacgtttatggacagacattgcaagtgaaacgctattataatcattttaatggcagtacctattattctttatatgataatcgaggtacttggcaaggatatattaatagtggtggaatgaagatggcggataatgcagctgggagtgcacaaagctatcataagaaaataaagttcacacaaaattttcctttgtggcaaaactttaactggaaaaagaaaagtaccgttacagatgcaatgaaacaagagacgtatgaagcaagatatgtatatcgtcattttaacggaagcaattacttatcaatttatgacaacaaaggtatttggcaaggttatattaatgaatcggccactcgccaagtaaactaaaaaattcaggacttgcgtatagattacgcaggtcctgaattttttttggtctcaagaggaagtgtgatcgtaaatgttgagccagcccctgggaagctgtcaactgtgatagtgccacctaacagtttcgtataatctttaacgatggctagtcctaagccggttcctcctgaattacgcgtacgagctttatctacgcgataaaaacgttcaaagatccgaacttgatcttctcgatctataccgatcccttggtcacgaactgaaagctgtaattgttttgctcgatacgaatagtcaacttggatggtcccttgtgatttggaataattgactgcattttcaatcaaattttttaagattggttgcagtagctctctttttgagatgaaaatcaactcttcgggaccattgatgataaaggacaactgtttttctcgtgcaattggttcataggagcggatgatttgctcaatcaatgctcgaaggttgatttcttgtgcggtgtaatcaaatgaatgactatctttggataaaagaataatctcttgaatcaaattttctagacgataggcatctttttggatgattttaaggaacgaaaccaatgtttctcgatcttctaaggcaccatccaataatgtttccgtaaaaccaatcaaagaagtgactggcgttttcaattcatgagaaacattaccgacgaaatctttttgcattttttctaattgacgcacccgagtcagatcataagagatccctaacaactcattttcattaaagagacgcaatgttacatcaagaactcgcggatgatcatcactcaaagcaatttcttcttgtaaagaaggggtctgctcgttcatgtgataaattaattgaatcaactgtgtatcatgaatcacttcagtgaatggttgtggcaattgaggcaatgcttcgatccctagctgctcttgcatggtagggttcagcaataacaatcggtcatcctgatcaatgataaaaaccccgatcatcagttcattcaacaggccatacaattgttgctcagaagcggcataagcttgataggttcgactcatttgttcactcaattgattgattgtctggtataagtcatcatgctcaggtgtttcttgcataatgatcgcctgttgatcaggagaagaaatcattttttttagaacaggcaaaatagtctgcacaggacgatttctttgacgtaacgcatgaaacgtcaaaaagctgacaaataaacaaaataggagataaacgaaaaagatcgaacgctgaatggtttggcttttagcaaaaaaaggtgccgttggttcagcgatccgcaaaatttgctgcaagttgccatcttctttgacagggatcgcaacatacagcaattcttcattcaatgtatcactttttcgcaaagactggcccagattactaccttttaagactgcttgcacttcaggccggttggctctgctttcttttaaagacgaatcgtaagtatcgtagatgatccgcccatccttgtccaataaagtgatccggctggaactatcctgtacataggcatcagcaaattgttgcaatgtcgctggttgattatcagaaaggttcaagaaaatcgccgctttttcttccaagaagtctacttgttgggcaatcacttgctggcgatagaagctgctaagaaattgccagcagatgataaacagtacggctaatagcagactccataggccatagccaaagcgtttcatgaatgaggctcctgaaatttataaccaaatccgcgaactgtcactaaatactcgggatgtttcgggtcacgttccagcttttcgcgtaaatgactgatatgcacatcaacgattcggctttggccatcaaagtcaaaattccaaatgcgattcagcagcgtatcgcggtcgatcacacggcctttccgtttcatgaagtatattagcagttcaaactcttttggagtcagaaaaatcttttctcccttgacgcttacttggtaattggtcaagtctgctaaaatgtcaccaatttgcaacatttctgctggctgatccgaaagatctgcagtgcctcgcggttccaaccgtctaaagattgctttcatccgagcaagcacttctctagggctaaagggcttggtcaaataatcatctgctccgatttcaagcccaagaatccgatcaatcggatcatctttagcggttaaaactaaaataggggtctcgattttttcttgtcgtagtttcttggtgatttcgataccgtccatttgcggcaacatcacatctaagataatgaagtcaaaatcttcagatagtgccagatcaacccccattttaccgtcgacagccgaaacgacttggtatccttctttttctaaattgaatgtaagtaaagtaacgatagatggttcatcatctaccacgagaatttttttcatcatgaactcctttcttaacaaaggaacaatcattttacgttgttctagctatattttagcatgaataaagaattggtactattgtctaccacaaataaatgctataataaaggacgatttgagaagaaagctgagggtgttcgatgattggaatcagtgcatgtttaggtggggtcatgtgccgctatgacgggcagcatcaagcggttgctcaactggttgaactcgttcaaactggtcaagcagtgatggtctgtccagaagtccttggcgggttgccaattcctcgtgagccagcagaaattgttggtggggacggtagagatgtttggtcacaaaaagccaaagtcattactgtcactggagaagatgtctcagaacaatttatgaacggcgcaaagcttgcctatcaaaaattacacgatcttgggatcacgcaactgatcttaaaagaaaaaagtccttcttgcggcagtcggattgtttacgacggcaatttttcaggagtcaaaaaagaaggtgttggtgtcgccagtgcttattttcaacaacaaggaatgaccgtgctgtcggatgtcgactggcttgctgagcaggaggaaaataatggagattgaaaaaaccaatcgaatgaacgcgttgtttgaattttattctacactgttaactgagaagcagatgaattatatggaattgtattatgcagatgacttctcattaggtgagattgcagaagaataccatgtaagtcggcaagcagtgtatgataatatcaaacgaacggaaaaaattcttgaagactatgaaaaaaaactacacatgttttcggattatatgatgcgggaagacttgttggagcaattatctgagtacaccaagacgcactatcccaaagatgaaacattgcgctcgttgatcgaagagatccaagaaatcgaagaataaaggaatgaaaaaagatggcatttgaaagtttaacagaacgcctacagcaggcgatgagcaaactgcgtaagaaagggaaagtttctgaagcagatgtaaaagaaatgatgcgggagattcgtttggctttattagaagccgacgttaatttacaagtagtcaaggaatttaccaaaaatgttcgtgaacgtgcagttggagcagaagtcttagacagcttatctcccgcgcaacaaatcgtcaagatcgttgatgaggaactgaccaaaacattaggttctgaaacagttggtattgagaaatcaccaaaaatcccgactgttattatgatggctggtctgcaaggggccggtaaaacgacatttgctgggaaattagccaaccatttgatcaagacagaaaatgcgcggcctttgatgatcgcaggggacgtgtaccgtccagcagcgatcgatcagctgaaagttttaggccaacaattagatgtaccagtttttgatatgggaaccgatgtcagtcctgttgagatcgttcgtcaagggatggcattggcaagagaaaagaaaaatgattatgtcctaatcgatactgccggtcgtttacacatcgatgaaacattgatggatgaattgaagcagatcaaagagttagcacagccgaatgaaatcctcttagtcgttgatgcgatgactggacaagatgccgtgaatgtcgccgacagcttcaatcaacaattaggtattactggggtcgttattacgaaactagacggggatactcgtgggggtgctgcgctttccattcgacaagtgactggtgcgccaatcaaatttaccggtactggggaaaaactgacagacttagaagtctttcaccctgatcggatgtccagccgtattttaggtatgggagacatgttgacgctgatcgaaaaagcccaacaagattacgacgagaaaaaagcagaagaattagcgcaaaaaatgaaagaaaattccttcgacttcaatgactttgttgagcagatcgaccaagtgatgggcatgggacctatcgaagatcttttgaagatgattccaggaatgagtcaaatgccaggtatcgaaaacgtcaaagtcgatccgaaacaaatcgcgcgtcaaaaagcgatggtctattcaatgacgcctgcagaacgggagaatcctgatttgctgaatccaagtcgtcgtcgtcggatcgcagcggggtctggaaatagcgtggtcgaagtcaatcggatgatcaaacaattcaaagaatcccgaaaaatgatgcaacaaatgaccaaagggaatatgaatatcccgggtatggatcaaatgtttggcggcggtgttaaaggaaaattaggtaaaatggccatgaaccgaatggtcaaaaaacaaaagaagaaaaagaaaaaacgtaaataattaactgaaataagcaagcagccgttatgctgatcaccatgaaaagtatcgaaaagattccaggatcatttctgatactagaagatggtttggtcgacaacggttgcttttttcgtttgcggtcttctgttcgtcagttgcttgtttggaaagggaatacctatcagttggatcgatagctgaaacgtaatatagcgacctttgaacatgtatcggctgagcaaggatagatggtttaactagctgatccaagtagattcattaagtacttgaacgcgttgcaaggcaaaatattcgtgctttagacggatagatgctactatttatttatagtaattgaaaggagcaagtgacgatgacaaacaaagatcgagttgaaggtaaaattactgaaacaaaagggaaagttacgggcgatgactccgaaaaattaaaagggaaaacccaaaacgaatacggtaaagtgaaagataaagtagaagactttgcagatgacgtttctcgcaaagtgaatcatttctttgataaacatgacgataaagataagcctaaccgctaatttaactgaaacaaccgttaacgatttcgttaacggttgtttttttcttttaaaaaggaagactgtcaaagaagtgctagctgacagtccggctattcataaagcgacgagcatgccaccattttttgattgctttcggataaaccaataggaagctgactacaagacagaccactaagtaaatacaaatcgaaacgatagttctcgtttgagagaagtcatcataatagagttggaccagcaaccaattcatattgatcaagtagaaccaagtaccaatggccatcactaaaaagacgggcaatcgaaaggcgggaaccgtcagatagtcgccgtcattttctaaggagatgcgggcaaacacttcttgagcagcagcaatcaacaacaaggataggagtagtgtggcgaagactgcccaccaattgactggtaagccattgggccagtcattccaaagattgttcaatactaagtgccccccttttccatagaagaaaaagctgagaaattcttgcagattatagtaaaaactgtaaaaaccgctcatcaagaaaaaaatcaaaacgatcgttaatggaccgaaaaagagattgcccaaaagcacccctaagaaggatccgatggctgtcactgccaaatttcctacaaacgtaccaacaccagatgcgaatagatctgatagcggaatttggaaatattcggagggaatcatcaagtagcgaatgcaaatattgctcaaaataccaatgattaaagcgaaactgaccggtgcaaataagaaaaccgctttttgacggaaaatctgtcgttttttaaacggcaatgagaataaaaaacgattgaaatttgtcttttgatcaatgaaaaaactaagaaaaccaaaaacaaacaataatggaagaataaaataagcgcctgaggtattgaaattagcaatatacgtatcctgtccattactttctggtaccggactattataaatgagcaagttttcatccttgtattcatcgatcgatgagtaatagactggtttttctccgttatagtccttaatatagtaatcaggatgctcttggaaatctttcttgaattcttctgaatcaaaatagttcttttgattgtgccaagaacgttgggtatcccagcccattcctgcataaatcaaaaccaagatcagacaaaagccaagcaacagtttgccatatcgctggcaataaatttgttttaacattttctttcacctctaacctttcaacagggattcttgactcaaattggcttcaaataaatcttccaaggtcaatgggagttcttcaaagagcaacggctctagttgccggatctgttcttctaatgccgcgtcgtattcttcgaacaaagcaacaatcacccgcccttgacgattgatcaatttcgaatgctgtttgatcattggcggtacctgtttcccacgaaagacgaattgaattttacgggcattttcccgcatcgtttctaaccgataatctttagcgattgttcttcctttgattaaaagggctcggtcgataatgttctcaagctcatttagattatgagaagcgatgatggctgtgcgattagattcactcaagttttctaacaaaaggccaatgacctttttgcgtacaataatatctaaaccgtcaaaaggttcgtccaatagcaagtaatcggcatttgaagcaatggctaagatcattttatacaatccttgcatgcctttagacattcggcgatacgaatggccaagcggcaatccattgctctgcatcagctcaagataaaggttttgattaaagtgggaataagcgagacgataaaaggcattgatttttttcaatgaatacgccgctaaaaagttctctttttcatcgatataaaataagttttcctttagttgtggcttctgggccaatgattgaccatcaatcatgatttcgccgccgtctaaagcgtactgtcctgagagtgtacggaaaagcgtggtttttccagagccgttgcgcccaatcaagccaacgatttcatttttgcgcaatgaaaatgtaacatcttctagaatagtagtcccttcaattttctttgtaacgccttctaggttcatttattgatccctcccagttcttcttcaaaaacagtgacccaagcagtgatttcttggatgctgatctgcaaatgtcctgcctcgatcactaattctttcaatcgttcttttaattgttggatgcgccgctcgtcgcgtggaacactgtccagtgctttgacaaacgttcctttgcctttgatggtgatcaagacctgctcattttctaatattttgtaggccttgctgacggtatttggattcatcaacaagcgtttggccatctcacgaaccgaaggaatttgatcacccggtctcaaaacaccatgcaagatgtcttctttgatgctcaatatcagctgctcgtaataaggtttgctgcttgtcttgttgatcatgaccatgtactcagcccctttcatttatgtgtactagtatacgtagtacactatcaaaagtaaagaacttttgctaaaataagacaaaaaggaggagtgactatgactcgttgtggttgggcaacaagtagtcccgcaatgcaagagtaccatgatcatgtctgggggaaaccggagtatgatgatcagcagttgtttcgtaagttggttttagatatgaatcaagcagggctgagttggcaaacgattttgaacaagatgtcaaattttgatcaagcatatgatcactttgatattgagacagtagccaattattcggaggaaaaaattctagcactgatggatgatcccggtattattcgtaatcgcagaaaaatagaagcggcagttcataatgcacaactcgtattagcgattcagcaagaaatcggaagtttttctgattttttatggcgttatgtcgaccatcgacccgtcatcaatcattttcaaacacaatcagaagtacccatccattcaccaatttctgatcgcttggcgaaagatttgaaagcccgtggctttaagtttgtaggaacgacgacaatctatgcattcatggaagctgtaggaatggttaacgatcacctgacaagctgtatctgttacgaggaacgttagaaagaagagaaaaatcgaggaggagtcttatatgggaaaactggttttttatggcgctatcagtttagatggctatttagctggagcaaaggatcaattggactggttgttggagaccgatacggggataagtactacgtatgagaaattttttgaaacgattgatgcaacagcgatgggccgtaagacgtacgaagaagccaaaaaaatgttggcgacggagaagctctatccagaaaaagaaaattatgtgttttcccgtcagatgcagaccgatttaacggacgcagtagttgtggatcaagacccggttgcttttttatcacaattgaaaaaagagaaaacggtttggttggttggcggtggaaagttattgcaccctttattggaagcagatctgattgatgaatggtatgtacagatcgctcctgtgttattaggaacaggcaagcgcttgtttgagccaggagagtatactactcgtttacaattcgtggatatgacgcaaatgggtgaactcgtagagatccactatcaacggaaatagatggcttgctttctgagtttctctttttctgtgttgcagatacttccttatgattcactcagagtttacattgaaccatccagcaaaaaaacgcacactcactggtttcccttatgggatagatcagtgagtgtgcgtttcttatctgactgtcacaaaatcgtgaccggtttttagttgtaacggttaaacaagtcgatgtagttgtcaacgattgtttggaagaagttgacggtatcttctttgatcgtattgttttcatcgatcaagttcatgattccaccgatataagcttctggttgttgcaaagtcggcatatctaagaataccaatgattgacgcaggtgatggttcgcaccaaaaccagcgatcgcacctggtgaaacacttacgactaaagcaggtttcccgctccagctgcttgctccataaggacgtgaaccgacatccaaggcatttttcaatgctgctggtacagaacgattgtactctggtgtaaagaagaatacaccgtccacactttgcaattcattacggaatgttgtccattcagtaggcactttgccttctacttccaagtcttcattataaaatgggagattgccgatttctaaaaagacagcttcgaaaccttctggcaataattctgcaaatttcttcgctaccagcttgttataagagccttcgcgtaaactaccaacgataaaaccaattttttttgtcatgttgaattcctcctcatatcttttacatgttttatcttaccaaaagtaagtaaaactgacaaataaaaagcatttgcctagaaaatccattcataaagcgatgtctcagctataatgactgtctctctctaatgatacgcgttgcaggaaaatctggcaaaagataacctatagaagaaagaaacagaaaaaaagagactgtaaagaaaaaactctttacaccgtcagtaaaacctgttaaactagctcttgtgattaaaacaatggaggtgtaaataatggcagtaaaaattcgtttaaaacgcatgggttctaaaaagaaacctttttaccgtattgtcgtagcagattcacgttctcctcgtgacggacgtttcatcgaaacagtaggtacttacaatcctttgcaagacccagctgaagtgacaatcaaagaagatttgattcttgattggttatcaaaaggtgcgcaaccttctgatacagtacgcaatattctttcaaaagaaggcgtaatgaaaaaacaccacgaagctaaattcactaagaaataaggtgacgacggatgaatgatttgcaagaattagtcttaacgatcgtttcaccattagtgaccaaacctgaggagatccagcttgatgtggttgaatcagaagatttctttgaatataatcttacagttgctccggaagatatcggacgaatcattggtaaacaaggtcgggtggctaaagcaatccggacgatcgtttacggggttcgcaccaacggccccaaaaaggtccgtttaaatatcattgatggaaagtaattgatcgcgtcactcattgagtgatgctttttttctatcctgttagttcatgctcaagacctatgacagatcggctgatttttgagataataagaaaaaggaggcgggagtatgtcacaagtgattgcatggatcctatttatttttgttttgatctttatttataaagtggggtcatttatctggcgcatattaggcgtattgtttttgctatttttactatggatctatcgggatgtcatctttacacaagttagtcaatggacacgagatttccgctgggatcaactaccaacttatttggaccaaggaattcaatgggtaaaagacggctggcaagccttgcaaagctggatttcgaataggattagctaggaacaggagacaagcaaagttgtttgtctttttattttggaaaaggtatgctctataaaaagggggaaatcatcatgaaaaaagaaataggtctcctagtgacagtattggccattggggcattagcaggatgcgacacgaaaaataatacggataagtctgagtcaacccgttcaagcactcatactagtacaaccatttcttctgaaagcagtagcagtagtagtgaggcagcctccagcagtgccgcgcaaacttcaagtaagacagttaccaaagcaggaacactggatcagttgtcagctgcttttccgcaggatcgcttgccatcagaggtgccggtgacggagcaaaagaccttgaatgctgcaaccgacgaaggggcagatcaactctctatcctctattatcagttaaatgatcaacgagaattgaatgatccatcattgaacaatgagacaccaatcgctagctacaaaaatgctgcttacgaaaatgaagaccaagcggcggaggctgtacatgcgaaccttgatgaaggcggacaggcggtcgatctaggacataacatcactggtcatatgcaaggtgcagctggttccagttatctaagttggcaagaaggcaattggaacttgacggttcgagcagtcaatcaagagaatcaagatcccgtgccagtagcaaaaaaaatcgtggcctatttagaagaagctatgctgcccgctccaggaattggtcaaatcaccattgatatgggaaaatcagattacacggctaacagcgtttcttggcaagacagtaagatcacttataccttgcaacatcaagatcctttatccgcattgaaaatggctgtctcaatgaatcaataaaagagccaatctaacgtgtaggaggaagtcatgcagattacgtatttatctgatcctcaagaaaagaaacagatcgcacaaaccattctggctgatttgccggaatggttcggcctgcctgaaagcactgccgattatattgaaaaaagtgcctatcaagaaatgatcgttgtagagaacaaaggttttttgacccttgtaaaaacaagtccagcgactgctgagatctatgttatgggcgtattgaaagccgatcaccatcaaggaatcggcagccaattgatccaagaagccatccgttggtgccaacgagaaagtatggcctttttacaggttaagacattggcagagacgcatccagaccaacactatcaacgtacacgaagtttttatgaggcgatgggttttttttgcctgtcgaaacatttcccaccctttggggagcggaaaatccatgcttgttgatgatccaagcagttccacctcgggaaaacactagaattccttaactccccatgctaaaatgagaaggattataaaggaaatgaggaccaatcgtgactgaatttttaaatgtaggaaaaattgtcaatacccacggaatccggggagaagtacgagtgatctcgcaaaccgatttcccagaagaacgctaccgtaaagggcaacgattaacactgtttcgagaaaataaagcaccgctggaattaaccgtcgctggtcatcgtaaacacaagaattttgatttattgacattcgaggggtaccccacgatcaatgatgtggaacctttgcgagacggtatcttaaaagtttcaaaagacgaattaagcgaactaacagaaaatgagtattactatcatgaaatcatcggcttgaccgtcattgatgagcaagccagagaactaggaaaaatcaaagaaatcctatctcccggtgccaatgatgtttgggtagtccaacgcaaaggcaaaaaagatgcgttgattccctacatcgaatcagtggtaaagcaaattgatttggataaaggcgaagtgcatattgagatcccagaagggttgttggatgatgaggattgatgttttaaccttattcccaagaatgtttgacggcccaatgggggaatcgatcattggaaaagctcgggaaaaagagcttctagaaatcaatgtctcaaactttcgcgaattttcggacaacaaacaccaaacagtagatgactacccttatggcggaggggcagggatgctgctgaaagttcagccgatctatgataatttaaaagcgatcgaaactgccaccccgcaaaccaaaaaacgtattatcttgttagaccctgccggtaagaaattcgatcaaaaaatggccgaatctttttcgcaagaagagcatctggtatttatctgcggacattatgaagggtatgatgaacgaattcgttcgctagtgacggatgaagtttctctcggggattatgttttgactggtggcgaattaggcgcgatggtgatgatcgatgcgaccgttcgtttgctgcctgaagtgctaggaaacgagacgtctgcgcagactgattcccactccacagggttgcttgaacacccgcagtacacgcgaccagcagaatttcaagggatgacggtcccaccagtcttgatgaacggcaaccacaaactgatcgaagaatggcgcttaaaagaatccttgagacgaacttatcatcgacgacctgatatgttggcggattatcccctaacagcagaaatgaaaaaaatgctacaagagatcgacgaagaagcttcggcagaggatgaatcaaagtaagaaatctcagtatctagaatcgcacctgcaatcaaatgaaaccaccacaacggatactagaagcaccagtctagtccgttgtcttttttatagagacaaaataaatgtcgggaaaaaaagctggtgacaagaaatttgtctttacatgagctggaaagttatggtaagatatttcagtgagtgtaaactcaactattacgatattccgctggagcaaattgctttaagaatgtttgggaataaggagaatgataaagatgaatccattgattcaagaattaactcaagaacaattacgtactgacatcccagctttccgtcctggggacactgttcgcgttcatgcgaaagttgttgaaggaacgcgcgaacgtatccagttatttgaaggtgttgttatcaaacgccgcggagctggtattagcgaaacttataccgttcgtaaagtatcaaatggtgtaggtgttgaacgtaccttcccattgcacacaccacgtgttgcacaaatcgaagttgttcgttacggtaaagtacgtcgtgcaaaattgtactacttgcgtgcattacacggaaaagcagctcgtatcaaagaaattcgtcgttaatcatttattatcagatgaagcaaaagcccttgttttcaagggcttttttcttttggtcaggaggggtctatcatttgctttaatgcctcatgcgcaagtaaataaggctgatcatgtagctgcatattttttaacagtatcccgaaaattgtcttttgttctgactgaggattcgattgaatccgaagaaaagtttgattagaatctcgaaaaagtcatgaaagtcgataaaaattatgctatacctaaacaaagataaaaattgaaatgagggatgaggatgaaagtcacttatttgggtactgctgcggcagaacgtgttccagccatattttgtaattgtaggatctgccgtcatgcgatggagaaaaaaggccgggagattcggacccaaacgcaagcgttgttggatgatggcaagcttttgatcgattttcctggggacagttacctgcaccgattgagtggtcgagtggattataatcgcgtcgaagcattattgctgacccactggcactcagatcatttttacggagaagatttagcttatcgaatgtccggctatgccaatgggatcacgactcaattggctgtctatagcaatgcctatgtgaaaggtttttatgaccgagcgttccaattggaaggacgttacgatgaacaacgcctgacgtatcatcttttggaagcgtatcaaaaaacatggatcaatggctatgaagtgtattctttaccggcacaacatggtcattttgccgaagattgttttatctatgtcatcaaagatccaacaggcaaaacacttctctatggacacgatacaggctacttgacggaagagatgtttgcttttttagaagcaaataagtttatttttgattgtgtatcaatggattgcacggggcagaccaatgctgaccagatggccaatcatatgaattggtcgcaaaatattcaaatgaaacaggagctgatggatcgcaagttagcgactgaaaagacgatctttgtcgccaatcatttctctcacaatggagggagaacctatcaagagatggcagatctctcagcttcagaaatgatcattaccgcatatgacgggttggagatccatctttaatccgtctgacgattaattcatgaatactgaatgtcaacaactcataagggaggcaaacaataaaaatagatcatgaaaatagcgtgttaagtgggaaacgatgtccagcgagatttaggtgctagagaaatgagtaaataaagaggaatgatttttcatgagaaatcagaaatttgaatactatatgcgagaattaaacctgattaaaagacaaaactggattgaaaatgacctatatcatctagttgcggaaatgattaaggctggcaaaaatatgtctaggctatctttaagagatgtaagcttgcgaagtaggagtccaaaaggtcagatattctatggcttatcttcatttcctgattttgtcatcttggatgaacggtttgataattcagataatcttgccgggggaagtgtaaatatagcgaataaaaatttgatttatggctgcgttgaagtaaaaaatgtcgatgagaagctattagatctagaatcaatcgatctaatatcagaatttgagaaagcaaaaaaaccaggaaatgaactgaatcaagatttaggccaactcttaggacaaatactatggtttaaaaaagttttgtatacaaatggcaatatatggaaattctacaaacgaacaagtcaagaaacagataactttcttactgacaaatgtatagaaaagttatttgaggatcgtatgaaaaatgaggcccctgattacaaatggtatgtaggactagatgacgataatttaaagattgaaaaagtttttgagtttgtcttagagagtgatataaaaaaagaagtatgggaagaatttctaaatagcttatattcgattaactgggaaggataaagatgctattgtggaagaataatcatcttttagaaatgaatcaggttgttttacttgcggctcaatggattgcagggggcagaaacatgctgattcaatggccaatcatatcacaatagccgaatgaagcaagaatggatggatctcaagggattgactgaaaaagggatctctgttgccaattacttctcacaatgggtgaacttatcagcaaataacggatctctcagcttcagaaatgattattaccgcatatgacagggttggagagctatctttgagccacttggaaatcgtctagcacgtataacgctatcgtcagtttaataagcgagttgaggacctatatttgatctcctcgattcgctttttttgatagtctgagataaaccgcttgctgatgaaggagtgtagctaataaaaaaaagataccagttgaagtgcgaaaaagaaaaaaatagaagttgttcttgaatgaaaatagttggaaaatcatttttcattttcttttatgcctgttaaagtcaatgataccaatcatattaacaagaccaaaaatgaaaatacaaaaaaaactgttcttagtattgactcataaaaaataccactactatacttgtattgtggttataaccagttaggagagacatcgatgcaaaatacatttcaatcaaaatcactttattatcagctggtagaaatattgaaacaacgaatcgaaaacagtatggtcgctcatgataagctgccatcagaaagagagttgaccagtttttatggcgttagtcgcacgacggtgcgactagcattgcaagaactggaaaaaatgggctacatttatcgacaacatggaaaaggaacctttgtttcggaattaaggacaaatgcgactgatctagctggcgcatatagttttaccgaacaaatgcgggcaatgggcaaacatcctgaaaccaagatattggccttcaaaaagattgaagcaaccaagtatttagcggggcatatgaatgttcaattaggtgaacctttgtttcagttagaccgtttgcgcttagccgacgatctgccaatgatgatcgagaaatcctatttgccagtgaagctatttatgacactatctcgggaactgctatcgataaaaccgttatacgatttgttttctgaagatttcaatcaaacggtacgatcggctgacgaagaattttatgccagtattgcccagaaagaagatagtgagctgctaaatattccagaaggatcaccagtgctccatttagttcgctcaacctataatctcgagaacgaagtgattgaatttacattaagtgtggcacgggccgataagtttcattataagatcaggcatctgcgttccactaactgaattggaggaaagaaaatgtttatgttgtcaaaagaagaactgcaaaagctaggagcagaaaatactacccgagaaattcgacaacaaccggaactgtggcatgagacgtttgaccgttatcaagaaacagtcgcagatctagatcgtttgtttacggatgcgaaacaacatgctggagagcgaccgatccgcgtcatttttacaggggccggaacctctcaatatgtgggggatacactaattccgtttcttactagtcaaggaaatacgaatcagttcatttttcaaagtattggttcgaccgatatcgttgctacgccaaaagaatacctgattcctgatgagacaacgatcttggtctcatttgcccgcagtggaaatagtccagaaagtctagccgcagttaagatggccaatcagctggtcaacaagatctatcatatcgtgatcacctgtgcaccagacggattattggctacacaaatgcctacaaaaaaagaaaatctagttttactaatgccaaacaaagccaatgacgctggttttgctatgacaagcagtttcagctgtatgacgctgactgcgctacttatttttgatcaagcaagcaatcagcaaaaagaaagatatgttcatcaattaagccgactaggagaagaagtcatccaacgagaatcagagatccaagggtatctggcatcagactttcatcgcatcatttacttaggttcgggaagcttaggcggattgactagagaagcgcaattgaaagttctcgagttgactgctggaaaaatcgcaaccgtttttgatacatctttaggattcagacatggtcccaaatcttttgtcaatgatcaaacattggttttcctgtttgtcagcaatgactcatatacgcagaaatacgatgtagatatgctggacgaaatcaaaaatgacggtattgcccaacgcgttgttggaattggtcaaaagggttcattgtttagtggtgattcctttgaattagctgcagattcgttactgccggatggctatcttgctttagcagatatcatggtagcccaaacgatcgcattactttgttcggtgaaggttggtaatacaccagatacaccatcgccaagtggaacagtcaatcgtgtggtcaaaggtgtaacgatttatccatatgaaaattaggaaagagtgtgaagcatgttagaatggtccgaaaataaaagacaagcaatggaacgtttatcgacgccggagggcattattaccgccctggcgattgatcagcgtggtgcactgaagaaaatgatgtcagctttagggatggaagcgacgaaagaaacgattgagcggtttaaaaccctgatttcacaagaattgacgacctatgcctcagccattttattggatccagaatatgggttgcctgctgcacaaaaacgtgcagcagagagcggtcttttgctagcatatgagaaaaccggttacgatcaaaccgttcctggtcgctttcctgatttgcttccggattgttcagttattcggtttaaagaatcaggtgctgatgcggtgaaatttttgctgtattacgattgcgatgaagaagaggaaatcaattttcacaagcaagtttttgttgaacgaattggaagcgaatgcatggctgaaggactgccattttatttagagttattgtcatatgatgctaaaaatgtagacacgaaatcgctttcctatgccaaagcaaagccgcgcaaagtgatcgaaatgatgaaagaattctcgaaaacccagtataaagtagatgtcttaaaggttgaagtaccagtaaacatgtcatttgttgaaggggatgcaacaggggagatcgcctatacacgtcaagaagctgccgcttattttaaagaacaaagcgacgcaacagatttgccatatatcttcttaagtgctggggtctcagcggcattattcatggaaacattgcgttttgccaaagatgctggggcacgattcaacggtgtactctgtggcagagcaacttggaaagatgcagtcgctccttttgttgaaaaaggagaagcggcaactttagaatggctgacagaacaagggacacaaaacattcgtcaattgaatgaagtgataagagaaactgccgtttcgtggcatgagaaagtagtacagccagtccaatagagcaattcaccttgcaaagctgactactaatgaatgggagcagaacatggctacgtttgaaataaaagaagagtttttaatgaatggttctccttttaaactactatctggtgcgattcattattttcgggtccatccggatgattgggagcactctctttataatttgaaagcgcttggatttaataccgtcgaaacctatgtgccttggaatttgcacgaaccgcataaagggttatttcagtttgaaggcattcttgatttagagcgttttttgtccttggcacaagagcttggtctgtatgtcatcctgcgaccttctccatatatatgcgccgaatgggaattcggcgggttacctgcttggctactaaaggagtctggacgattaagagcatgtgatccgagctatttagcgcatgtggcggaatactacgatgtattacttccaaaaatcattccctaccagttgagtcatggagggaacattctaatgatccaagtggaaaacgaatatgggtcatatggtgaagaaaaagcttatttgagagctatcaaagaaatgctgataaaccgtggcattgatatgcctttatttacttcggatggtccttggcaagccgccttacgagctggcagcttgattgaagatgatgtattggtcacagggaattttggttcccgggcaaaagaaaactttgcagcgatgcaggatttttttgatcagcacaacaaaaaatggcctttgatgtgtatggaattctgggatggctggttcaatcgctggaatgaaccaattattcggagagacccagatgatctcgctgaatcagtcaaagaagctttggaaatcggtagtgtcaatttatatatgtttcacgggggaactaattttggatttatgaatggttgttcggctagaggcgcagtcgatttaccgcaggtcacttcctatgactacgatgcaccattggatgagcaagggaatccgacagcaaagtattacgcattgcagaaaatgctaaaagaacattttccagaatatgaacagcacgaaccgcgcagcaaaacatctctatcaatggaacttcaactacaagataaagtcagtttgttttctgttatcgatcaaatcagtcagccggtcaagacggtttatccgcaaacgatggaacaattggaccatccttatggctatttgttgtaccgcacgaagaaacggcgggacgcggaaacagaaaagctccggatcattgatggaaatgatcgtgcccagattttcttgaatgaaacattccttgcaacgcaatatcaaggagaaattggtgaagacttattgattaagcaagcagcagaagaaaatcaattggatattctagtagaaaatatgggacgagtcaactatggacataagctgacagcagagacccagcgaaaagggattcgtagaggtgtgatggctgatctgcactttgtgaccaactggactcattactggctagacttcagtaagtcaccagcaattgattttacgcgggactggcatccagaacaacccgggttttatcgttattcctttgtgctagaggaaaaaagagatacttttattgatttgacaggattcggcaaaggagttgttctggtcaacaatgtcactgttggacgcttttgggaagtgggccccattttatcattgtacgtaccaagcggatttttgaatcatggggaaaacacaatcattatttttgaaacggagggctgctttgcaaaagaagtacatttgagaaaagaaccggtttataaaacgatggaggcgaaaaaagtatgagtattattggtgtacgtattgatggacgattgattcatggacaagtggcaaacttatggacgaccaagctgaatattagccgaattatggttgtggacgacgatgtagcagaaaatccaatcgaaaagagtggcttgaaattagcaacgcctgcaggggtcaagttaagtatcttgccgattgagaaagcagctgccaatattttggctggaagatatgattctcaacggttgttgattgttgctaaaaaacctgaccgtttgctcaaactagtggaattaggtgtgccgatcactgaaataaatgttggaaacatgtcccaaacagctgaaacaaagtctattaccaagtcaatcaatgttgttcccgcagatattgctgatttcaaagaacttgctagcaaaggtgtgaaactttttgcacaaatggtccctagcgataaagctgaaaactttatgagccttttagaaagataggagaatcaatatggaaattcattggtggcaaattttattattatcattatatgcaggttatcagattctagatgaattacagatctattcttcaatgagtgcgcccgtttttgctggtcttttttcagggttagtgatgggagatatcacaaccggtttattgattggtggtagtatgcaactgacagtccttggtgtaggaacttttggcggtgcttcgcggatcgacgccaattcgggaacggttttggccacggcattctctgttgcattaggaatggatccagaacaggcaattgctgcaattgctgtaccggtagctagtttgatgattcaattagatattttagctcgttttgcgaatacgtattttgctcatagaatcgatacccacgtggaaaatatgaatttcaaagccatcgaacgaaactttttgttgggcgcagcaccgtgggcgctatcacgacttgttcctgtatttctcgcgttggctttcggtggcggattagtcgaaaacgttgttagttatttgaatggtgatttaaagtggttaggcgatggattatccgttgccggagcagtcttaccagctgtaggttttgcaattttacttcgttatttaccagtaaaaaaacattttccttatcttattttaggctttgttttgacagcattattaacaacggtatttagcaatatccaactattgggcagcagtgtagcaagtgttgtaaaagatttcagcggtaccttcaacgcattaccaatgttggcaatcgcactaattggtttcgcatttgccgctatcagctacaaaaatggacaagcacgtccagcaactaataccgcacaaaacgagcagcattcggaaggagagattgaagacgatgaaatctaatgttaaattaacgaaaaaagacttccaacaaatcaatcggcgcagcctatttggtttccaactaggatggaactatgaacggatgcaaggctcaggttacttgtacaccattttgccgcaactacgtaaaatctatggggacaacacccctgaattaaaagaaatgatgaaaacgcatacacagttttttaatacatcaaatttcttcaataccattatcacggggattgatctagcgatcgaagaaaaagagggatttcaggcaaaagataccatttcagggttgaaagccgggttgatgggacctttcgcagcaatcggtgattcgattttcgcagccctagtgccaacgatttttggtgcattggctgcgaatatggccatcaatggaaatccgatcggcatctttatctggatcgctgcacaaatcgtagtcatgatctttcgttggaaacaactggaatttgcttataaagaaggtatttcccttgtgacaaccatgcaaagccgcttaacagcattaacagatgcagcgacattactgggtgtttttatggtaggagcattagtggcaacaatggtcaatgtaaaatttgcttgggcaccaagtattggtgaggtcacattgaatatgcaaaacaatattgatatgattttgccgcggctcttaccagcagctattgtcgggattgtctattggatgttaggaaagaaaaacatgacatcaaccaaagcaattttcgtcgtattgatcgtcagtgtggcactgtcggcgttaggagttatttcgaagtagatggaaagtaggtaggaagttgatggaaaagcaattagtcttgattagtcatggccggttttgtgaagaattgaaaaaaagtacagaaatgatcatggggcctcagtcagagatccagacagtcccattattaccagaagaaggtgccgatgattttcgccaaaaactagcagctgtcatcgctgacagtcaaaaccctgtggtctttgctgatctgctaggaggaaccccatgcaatgcggcttctcggttaatcatggaaggtgcgacatttgagctgtatgcaggaatgaatatgccgatggtgattggcttcctcaaccgtacattgacaggagatccattggattatgaacaatttggtaaagagaatatccaacatgtcaacacgcttctcactgcagtagcagattttgaagaagattaagcagaggcaaagacattagaagttgatcagcaaagaaaaaccggcattagctgtacttcttagctatcacctatttgccttaaccaaacgacaaaaagcgctgaaaagccccaactctttgaacaattccctaaaaaaaggtatgatagctaaaagtatatttttgaagggacatcaaagggatgaagtactcaacgaaatacagcgatgccattcatattctggcctatattgaaatgttgaagggaaccgatctatccagtgatcgaattgctcaaagtgtcgagaccaatccagcctatgtccgccgaatcatgagtgatttgcgaacagctggcttgattgagagccaacggggaaaagctgaacctaaattactaaaaaaacccgaagagatcactttgctagacatttattcaagtgttgaaaaggaccaacgattgttgcatattgacaaaaaaaccaatcctaattgtttgattggcggtagcattcaggaagttctagatgagacctatgagcgtctgcaaaaaaaaattgagttagagatgcaacagatcacactagcagatatcatagataaactcaatgtggctgctgaaaaatgaagagagacagctccgtttcaaaagcaaatgcttgacgaaaaggagctttctttttataatcaacatgtaaccttaaaagttacatgtatttttctacatgtacaagtttaaagatgaaaggaagagagcaatgaaaattggaattattggtgcaacaggaaatgctggttcagcgatttatcgggaagcaagtgcacgaggacatgaagtcgtagctatcgtacgcaatgaagaaaaagcaaaggaaatgtttgggaattctgtcaaaacaataaccaaagacgcgtttgaattgaaaagaggcgagttggaaggttttgatgctatcattgatgcgtttgctactagccctgatcaagcctatctacatgtcgacttagcagcccgtttgatccatcttttccgtggaaagaaaactagattgttcttcattttaggggcgggtagtttactgaatgatgctggcgacttgaatgttaatgacttgaaaaaagcacctgatagtgaaagctggatcgcgattccagaaaatcaattagacgagtacaatttcttattaactgttaaaaatgttgattgggtaggaatttctccagggaaccttttccaagctggggaagctaaaccggctattttaggaaaagatcacttgcttcaaaatgatgccggacaatctgtcacatctagcggaacattggcaaaagctattttggatgagttagaagtccctcaatatcaacaaacaagatttacagttattgatgcctgatttttttgacgatcgggatggtcttgaggagcaaaggagcggaaagaacagtaatgttttcataatgtttcttccaagaaaacaggaaagaaaccattttagaagaaagagttttcgaaattcaagaattctaccaagacaaaactctgcgagttgcttataatcaatagcagaggtgatggatatggagaaaaaagaagcatacgagctgatgctccttcagttaaaaggattgttagaagcggagagtaactggttagcgaatctggctaattcttccgcattgctgaatgaaacgttaccagatacggtctttgccggctattatctgtttcaagaaggcgaattgattctaggtcctttccaaggccgcgtgtcttgtacccgcatccagttaggaaaaggggtctgcggggagtccgctgctgagaaaaagactatgatcgtcgataatgtcaaagaacatgagaactacatatcttgtgactcggcagcaatgtcagaaatcgttgtgccaatgctggacaatgaccaactgatcggagtattagatatcgatagttcgaaaacaagtagttatgacgagatcgatcaacttttcttagaaaaatttgccgcttcgctagtagctgcacggcgtaattgataaaacgagcagcgaatcgtgttcgctggtacaaaagaaatacccaaacgatagaaagcgcaactttagttcttgaagttgctgaattgccggcttgtttctgaggcaacttctattcgtttggtttttttgtctgtactggttttttgtgcgaatcaatgcgtattacttttaattattaaaaaacgatgatattatgataacataattagaaaaattaaatttgaaggtggaaattatgaattgtgataacattgttttaggaaaagcgtatgaatgtaaaccggtaggtatgcaaaggaggatcatcggtgaggtaatccgcaaaatggaaaattgtgtggtgatgagtgtcgtaagatatgatggcattgatcatgacgaaatcgaggaacgatgtggaagagtcgttgctcggtataatgaaatctatggaccagctttagtcgaatgtttttttagttaaaaaaagacagaagcttattgtttaaaaacaggaaaataatgagctcaacaattaaaaataacaatttaatcaataatatttacggtgttagccaaattttttcagcaaagagtatcctttgctgtctgggacagtaactttcaagggcagaatacttgcctaatagttacggatcctattttctgctatcatcgttttttgtatgctgcgatagactgccaggcggccaataaatttcaataaagacttaatgatggtacaataaattaaaatcgtacgcctggaggagaatgttatgagagctgaattagtgatcttagaagaagaggagttactgtttaagcttcccaatgaacaaggtttattacaaattgcagatcatgatcgtgtgacacagcttgataatactgtgttttttcttgttaagaatcatgcggtaacagctattacaacggatacattgctggacttgactcagccccatgatcgaatcattagtattactcctagctgggaaatccaggcaccttaccttgcacattattatcaggagaagtatggtttgttgaagaaaaaaagtgaagcgatcccaggtgagcaaagtgagctcattgcatcttgcgcaaaaaattttgacttattgttagataaacttggctattaccaaaataccacttcccttgatccagtgaaaaaaacaaaagcaaggcatcaatggaaaaaagaattgcaggatcgacctttctatattgactatcaaggaagtcaggcaactgtttattggcaaaagcgcaatgaaatgcgaatcgaaaaaggggcaaaattagccgaagaaattccatataataaagacggttccttgggattttctgctcgcttaggagaaaaaatccgccaagatcatcaagcagcgattaaggatcattgcacgatagaagaagttattttaaaaagtgtcaatgaggttggtctgtttctttactacggagggaccaatggttggttgcagttaaaagacccatccgggcagacactccacgaactaaccgtggtgggctgacacgacaaatacgcgatacgcagtcgaaggacaacgcttgtcagatgaaatggattctcatcggcaagcgctgcccttcttttttagctgaactttcttgaaataagtttcaactcagttcttgctggaagatacaattgagtcgtcgaataaggaataatcttgtccactcttgtttattactacggaaggttttccgtttccttctttttctgcacgataagcttcacggtgtttttgcaagtgttcgggccgctttagccaggcttggaaatgtttcttttcttgccattttgagacgagttgaaaatcgactgatgcttttttttcgttgatccaacattcagattggagacagccttcaaacgttttcatcgaggcgatatctttgcggatcttttctgaaaatgtttcttttgcttctgctaaaacttcaaatgtcacagttttgatatacatgaccaacactcctttttgtggtaaatgcacgatttgactttgcatcatcattttccaattagtataactgtaattgagaatgattgtcaattaggtcggtatttttcttagaaaatacttgcttagtgaaaaaagatgtttctttcctacctaagaacagctaggaaagatctctccataggacctttctctaggtatcttagaagattctttcaagtaagggaatttgacagaaagattcgaatcacggtaaacttcacttaacaaaacggaatttttagaattatctgaaaaataggaggcgtcaagaatgacaaccaaagcaagagttatcggatcactcatcgtttgtagtttttttctagcagcctgtcaacagccgtcatcgaaaaccacagattcaaccaagtcagcaaatgccaatcagccaatgctgaatgttcagttttctgctgaaatggggagcgccgatttgtcgttagcaaccgattcttacagttttattaccttgaacaatgcctatgaaggactttatcgactcgatgaaaacaatgaacccgtgattgccggtgcgagtgaagacgcaatgatcagtgaagatgggatggtgtacacgatcaaattaagagaagatgccaaatggtccaatggggaacctgtcacagcagaggattatgtctttagctggcaacgaacggttgatcctgctaccgcctccaactatgcctacatgctagcaccagtcaaaaatgctgcagctatttccgatggaacgaaggataaaagtgaactagggatcgaagccgtcacgagtcatgaattgaagattacattggaaaaagcaacgccttattttaaatctttactcgcttttcctacttttttcccgcagagtgaagcggttgttcaagaacatggggatcaatatgccttaacaagtgcgaatgcagtctacaatggtcctttcacattggaggattatgacggcccaggtacagatattcaatggacactcaagaaaaatcctgagtattgggatgcagagtcagtgaagttatccggagttcagtttgatgtcgtcaaagaatcttcaactagctataatttgtatgaaagcgggcaagcagatgacatcacattgagtggggaactggcgatgcaaaatgtaaatcacaaggattatgttgttcaaccgagcgcgacgacccagtatttagaaatgaatcaagcagcggaggactcaccgtttcggaatgaaaagttgcggcaagcaatttcctatagccttaatcgtcagcaaatcgttgatcagattttaggtaatgggtcacttccagctgttggatttgttccttctgatctagcctttaatcctgaaacgaaaacagattttgttaaagatgcagggacttcgctgccttatgatgaagaacaagccaagaaattgtgggagcaagcaaaatccgaactaggaaaagataccctcacctttgaattactcacctcagataccgatcaatcaaagaaattagccgaatacattcaaggaacgcttcaacaaacccttgaaggattgactgtagaagtgaccaatgttcctttttctgtgcgattagatcgttccaatagcggagatttcgaaatggtcatgaacaattggatcggtgattatgcagatccgatcaatttcttggaacttttcaaaaaagatagttcatacaatcgcggaaaatggttggatgatacctatgataacttgatttcagaagcatccgatgcatatgccaacgatcctcaagcacgttggcaaaatatggtggaagctgagcagattttgaatgaaaaattgggcgtgattccattatttcaaagcgcagaggctcatttacgttccccaaaaatcaaaggcttagtggtccatagtgtcggtgcagcctatgactacaagaatgtttccctagagtaaagaaacaagcagtaagttagaagagatggatctttcatctttccccagattgcacaagcaaaaatgatcaataaatcagcaaaggagaacctagtgaaaaaagcagtccaagcagctatgacttttttatggaaacagccgcagcaaaatgcagttttaacaaaaatcaatgcgcaacctttagaagcagtccattcgtttttatcagcagcagatgcaatgactctctatgaagaggacttggttgattcagagattctttatgggaccgttgtcgaagtcgttcaagaaaaagaagaatgggcagaaatcattgtcttagaccaagcaagtaataaaaatccccgaggctacccagggtatgttcctagcaacgtattgactgtcatagacgagaaatatggattggggaaaaatcagaaggtagcagtaatcaaaccaactgctgtcctgcaattcaaagatcatcaaagaatcctttctttcggaaccctgctggattggctttttgaggacgctgagtggtatcatgtgatgacacctgaaggaccagctgaaatttctaaaacacaagcccaacgaatcgatcaaggaaactcaacaactccccgacaattgatcgagatggcagaacaatttctggatttgccttatgtatgggcagggatcagcagcagtggctttgactgctcagggtttatgtatagtttgcatcgggtcaatggtattttgattcctcgggataccattgaacaagcgcaagcgggtgtgcagcgatcctatgaacaggcgcagccaggtgatctattgttgttcgcatatgaagagggaaaaggaaaagtccatcacgtcggtctttatttaggtgcagacgagatgatccactcacagaccccaggctccaaagtcatgaaaacaaagatcactggttctgcttatgagccggaattggcagttgtcactcggtatatcgactagaaacagccgcaataagaaagaatgaggtagaaatcgcaagtgatagaaacaaaaaaatagcagtaaccgaggaaagcccaccatttttgcagaatgcagcaagaaatgtcgggctttttgaccgatcaaaagagagatcagttattagcgacaataaagtcacccatatcgtatcgatgccgggattgtgaaaattcaaaaggtatcccattttctaagtaaaccgtttgctcgacttctaaaatggggtcattgggggaacaaatcaaatgctgctggtcatagatatctggacggtcggctttgatccttcgaatcgatgtgccaatcggtaagtgcaatgtattggaaatatattcataaacggaagctttgagaacctcttcggtgatgccgggaatcactgcgactggcataatggtatattccagcgcgaccgggacgtcatccaataatcgcaaacgaacaatatcatagattcgatcttctttaccaagtctcaattttgtttgttcttgctcatcagccaaaagcgtatcaaaggaaatgattctgcttgtgagtttgccagtctttcctaagcgcttggttaatccgcggttcactcgggcgttataatcgaaggtagaataggcttcactgacaaaagtgccagtgccttttttggcatagatgattccctctacttgcaacaaattcaacgccttttgaatggttactcggctagttttatacgtaatggctaattcagtttgtttaggcagcttctgattcttctcatactttccatgactgatttgtgtacgaatatctgctgcaatatcatgatagtaagccaaatcatttcctccttttttgaagcataatcgattttgctgagtatgtaaacctcgacgtttacatactcagctttttgcttctttcgacgatttacagaatgaaaaaaatccagtaaattgagattgtaatcggttgcatttggtttgtttattttggttaatcatagaggagctaggaggagtaaaaatggaagggtttatggatcgattggcaaatggcttaggtaaagttgctacgagaatcaatagttggcggtacatcatggtaattaagaacgcttttgccgctttgataccagtcattatcacaggtgcctttgggaccttattttcagcaatggtttttgattcggagaacggcttagcaaaaattgatgcgctcagctttttagaaaatctaaagccgatctcttcggcagtcagttatgtaacacttagttttctaacgatttatgctgtttttttaattgggatcgaactggcaaaactgaacaaaatcgatggtgttttccctgggatcattgcagtgatgtcttacttatcggtcaatccgatggtttttgaattcttacatgaagatgctactgttattgccgagaatgttttagcgaaacaatatacagatacgaaaggtttattcttgggcatgttcgtggcaatcctatcaattgaactttatgcctggctttgccgccaaaaaagattgcaaatcaagatgccggaaagtgttcctgccaatgtctcagcaagtttctcggcgcttttccctacaatattagcagtaacgatcatcgcgacagttggctttgctatcaaagccatcacaggaatgtatgcttacgatatcatttataatattgtgcaaaaaccattagaagggatagtacaaggtctgcctggtatcttgttgttgatgtttattgcacaagttttctgggtcattggtatccacggcaatcagatggtcaaaccaattcgtgaaccattactgctagcggctatcgccgtgaatacagaagcctttgaggcaggaaaagaagtgcctaacatcattacgatgccattctgggatatgtatatgagtatgggaggatcaggtgtcaccattggcttgctgattgctatcttgattgcaggcaagcgtgaagatatgcgtcaaatcacgaagctgtccttagcaccaggcattttcaatatcaatgaacctgttattttcggtatgccgatcatgctgaacccgatcttggcgattccatttattctgaccccgattattaccggcacggtgggttatattgctacatccatcggttttgcagcaaaagcggttgtgatggtaccgtggccaatgccgccaatcgtcaatgcctacttagctacagcaggagacatcggtgcagtggtcacacaaatcatctgtattttattatcgatcattatttatttgccattcgttatcgtaatgaatcgttcaacgaacgaagtggcataaaaaggagaggcttatgttaattgaaataccagaaacatttatcttaggggccgcttcttctgcttggcagacagaaggctggcaaggaaaaaaagcgggtcaggattctttcttggatcaatggtatcaacaagagcgttttgtctggcatgaaggctatggaccagccgttgcaacgaacttcatggaacagtatggtgaagacattgagctgatgaaagagattcatctgacacattatcgcacatccatcaattgggcacgcttttttaccgactatgagaagttgatcgtcgatgaagaatatgcagcccatatcgatgcggtgatcaatgcattgcttgctgcaggagtagaacccatgttgtgtctggaacactatgaattgcctgcctacttattagacacgtatgatggctggagttctcggtatgttgtcgaattgtatagcaagtatgcagcaattgcctttgaacgttatggtgatcgggtcaagcactggttcactttcaatgaacctatcgtgatccagacccgttgctatcttgatgcgattcgctggccccatgaacaaaatacgaagaaatggatgcaatggaattatcataaaacattagcttctgcattagcgataaaaacatatcatgaaaaaggctatcaaggcagaatcggctgcgtattgaatcctgaaatggtgtatgctcgttcttcttcgaaagaagatcagcaagcgaaaaaaatgtacgatcttttcttcaaccgagtcttttttgatccgatgattaaaggcatttatcccgaagaactgattgcattatgtaaagagcatgatatttattttgatcctgcaaaagaagacttagaagtgatccaacaacatacggttgattttttaggaatcaatcaatactatccaaagcgtgtgcgggcaccttattatcagtggaatgctgaaacaccgtttcatccggagcgattctatgagaactttgatcttcccggcaaacaaatgaatcgttctagagggtgggaaatctatccgaaagtcatgtatgacatggcaaactacctcaaagaaaattacggcaacattccttggcttatcacagaaaatggcatgggtcgggagaatgaagaggcgttcatggatgagaatggtcaggtagtagatgactatcggatccaattcatttcccaacatctttattggcttttaaaagcagtagaagaaggggcgaattgcgaggggtatatgctctgggcttttaccgactgtatctcaccgatgaatgcctttaaaaaccgttatgggctggtgcggatcgaaagaaatgctgcccgtacccgttctttgaaaaaatcagcctattggtatcgagaattaattgatgaacgtcgcttgtcctatgaggaattaccgcttattctttaaactaagtacattaagattagagaagctgtgacaaatcttttgtcacagctccttgtgtatattgcttaaaaatccaattgatgaggggctaatttgtcccagtcaaaggtcacaccaattcccggttcttctggcgcgatagccattccatcctctggatcaatcatcagagggcgagtggtgtattgatcgatcgggaaactatgcatctctaggtatccggcattaggcatggcagccagcagactgacatgaagctcttgcatgccgtgagtcgagatactgacattatgcaactgtgtcaatgccgcaattttcagccagccagtgatccctccacaattcgaggcatccggttgaggaaaatcgacttgaccataagataacatatgagcaaattcaattggtgttcgtaaattttctccgccagcaactgctatttgaccttctttagcgattcgagcatatccttcgtagtcttcgggaatcgttggctcttccaaaaagagaatatcaaaaggcgccatcaatttagcggctttgacggcttgttcaacggaccagctcatattggcatccaccataaaggtaatatcgggaccgatcaatttacgaacggctttgatgcgggcgatatcttccgccaatgttgcttgccctaacttgattttgacagcccgtaatcccatatccaaatatttttgattgttggctaataatttttctaatggaaaattcaagtcaatggcaccgccatagcagtttactttattgctgtgtcctcccaaaagtttatataatggttctcgtgctttttttgcgcgcagatcccaaatggcaatatcacaggcggcaatggcaaagcttgctagaccacctcgggcaatgtaatggatgccccaattcatctgttcccaaagagcttccacacaagcaggatcttttcctagcaggatatgtttcagttctttgtcgatcaatttagcgatcgactctcctccgaaaccacccgtatacgtataaccgataccttctctaccatcatccgtgcgcactttgacgattggcacctcaaagtgagtgtgtaatccgtgtttggcatcttccattaattctggtaagggaatccgatagtaggaagtttggatttctgtgatcgtggacataaaattcctccttttccaataatgttaacgtgtgcattattatcttaacatccacttggcaagaattcaagcggtttcatttgtagtttgagttgtcaatctctttctatcattgtaataatcctgtttttccagcgacctttaaccaagtgattccgatctgaaaaggagtcaaatttcttggtgggaacacgctgaaatagttgaacttctgcgcaacccaagctatgatgaacaaaaaggagatcacacatatgtgtacaagtttcacgctgactgctcatggacagactttttttgctcggacgatggactttgcatttttgttagacggcgaaccaatcgtcatgccacgggggtatcaatggtctttacaactagggggacaggtcaccaatacctatggctttgttggaacgggcaaacagttagaagaatttctttttattgatggggtcaatgagaagggactaacgattgctgaactctacttttcgaatgaagctgtttattgcgaatacacagcggagaaaataaaccttgcaccccatgaattgttacattgggtattaggaaacgtagcagacatccctgatttgtaccaaaaaatcagcaggatcaatctagtacagatagaaacggcgctactaggtatcacagtcccattgcattttattgtaacggatactaccggaagatgtgttgtcattgaaaccaatcgtggttttatcgaaataaaagaaaatccaatcggcgtgatgactaacagtccagaattggagtggcatgtaaaaaatattggcaactatttagctgcgagacctgctaattttcctcccgcaacagtcaatggagtagaggtgctcccctttggtcttggaaatggaacatctattttaccgggcggattgacttcccctgaacgatttgttcgaaccgtttatcacaaacagtttgtgaatgtaggagagactgccgaagaaacagtcaatgccatgttccatctcttaaataatgccacgatccccaaaggactgatggtcgaagataatggtcaatctgagtatactcagtatcgagtggtctataatgtgacaaatggtacttactatttcaatccttatgaaacccaagaagttttttcattggaattgaagaaagagtggttacaattgaaacagccccggatttttgcggttgccaagagtttcacaacaaaaacgatggtgtaataatcggccacacaacggtcgatgcaaagatagataagtagaaaataacttagtttaacgaagagtcatctctccaataaaaagatccgcggtgtgtcattaccgcagatctttttttcgtgtgatttgccgtcgaaatttttgtagtaggtagctggggagtttatctattctgatgctgaaaaaaacggttcaaaggaaaagcgtattcttatgataatcgttcattgaaactacgagaagaaaacaagaaataatttttttactttcagatattaaaaaaaatctttgaaatacaataagtccagtaatttttttttatttgaaaatagtaaggcgtcattgataacaacactgggaacgtttgtttcagaaatcggctgattcgtgatgatcaaatcaaaggattccaagtcatagttacctaattgctcaccattgatgggcaggatatctgaacgaattttatgcagatcaagaatatcttgaacatagtaactgatgtattgactgtgattgatccccatatcgctgatcactaagatcttttttgacaccaaagtctgattgatctccggaaaagaagtcaataaccagaatacataagaagacaaataactgatgagattcgtttccaacaattcagaaaaaaaatgcagttctgctttgagtcgtgcatacaattggcgctgtgtaaatttgatatgtcttgtaaaaaaagtggcacgctgtgtcagctctgtcgtatcaaagggcagtaattgcgcataggaataaagacaagtcagcaagtgtacaacgaagtcgccgacctcgtctgtgatttgttccaactgcagaaaagtattgaaggtcaaattgtcacgtatcttctcactgatcacagatctattctctgaataaaattgctggaaagcccctttttgaaagtagtcaatgactgtttggcaagactctaaactaataccactcaaatggcgtttaatcaatgaatagtcttcattactgatttttgctttcacggctatcttggtgatagggcgttgccgaaatccttgactctctcttaacaaatcaacgataaaatacataatgaaaaagtcatgttcatagctgttgtccaagctgatactattcaaaatgcagtgattgcgccgcatcacttgttttagttcttgtttatcaaagtgataaggcaaatcacaatggccataatacatcaaaaaaaagtaggtcgtaaatatccgcagagacagctcatcgtcctgactcgttaactgatacccgcgatccacaatgacccgaagtgaataggcagccaacactttattgcaatgttttagttttcgtgcaaaagatgatcgactgatattgattgcctcacaataataatcgatcgttttgcctggctgttgaataaattcatgaaggagttgtgtcgttgttgaagttctcgccatatctgtgagtatttgaagatacaatgtagcattgaaattctctagacgataccctaatttatgcgatgttttgatggttaaaacatttccccagcgttgcttgatctcttcaatatatcggataaacgttgattcgctgctaccaatgtgtcttgcaagttcttttttagtcatccacttatcagaaatggataacacacgaatgatttcttccatcttccgataatttttctccaaaaacctaatcatttcatttcctcccaagtcctttactttaataaaacaatcaacgaaacaataacgcaatctcaataatgaaaccgcttggtatgaaagctggtgtgatttgattcttcccttctatgtatacttaggtatctgattagaataacaaatttccagcatgcaagctattgggatttgctattggttcgcaaatgaaaggggagaatgaaaattaatatactgaggaagttgtgggttttaggagcagtatttatgctggttagctcctatttcacatccataatcgttagagcagaaactattaatggggcagctattctatctgccaaaatcatatcagatgattctgagcagccacagctattactagatgtcgcactcacgaatcaaacaaatgagcccataaaaaaagaaataagaatggatcatgccaagctaaaagaagtagaagaaaaacaagagggatacggttatcaaattaaacacaataccctctatctgacaatagagcctcaactaaatcagaccattcaactgacgctgctcgttgagaaaaattcttttttgaccgagcaagcaccagaattaatttacgaaggtcagatccaaaaggtctctgttgtcatgccgcaggcaacaaaggaaaaaccgactgacacccaggacaatacttctagagcagaaacggatgctgtaaaggaaacagctgctacagatacacattcagcagaatccgaagagtcaaaatcaataaatccatcaaataccaacgaaacgctgacagaaaacagagaaacagaaggacctgaagcatctgaagcatctgaaagatcaacagctgcagatgaagtgataaaacctttttcactccctagcgttgcttctgatccagtgttcgatcgcagtcataaagcaatcctgcctcagtatacgacagatgcgtcaggaacctatccgacagcaagctggcaaccgactgggaatcagaatgtgcgcaaccatcaaggaaacaaagacggagctgcacaatgggatgggcaaacggaatggaacggggaaccaacgaacaaaaccaattcctatattgaatatggtgggactggttcccaagcagactatgccattcgcaagtatgccaaagagaccacgacacctggattatttgatgtatacctaaatattcgcggaaatgtccaaaaggagatcgcaccgttagatttggttttagtagttgactggtcaggtagtatgaatgacaacaatcgaattggcgaggtccaaaaaggggtggatcgatttgtagatacgctagcagaaagtggaatcacagacaacattcatatgggctatgttgggtattcaagtgatggatacaagaatgattcggtcgcgatgggcccctttgattcggtcaaaaatgccattaagacgattactccaagcagtactactgggggaaccttcacgcaaaaagccctgcgagatgccggaaacatgttggcaacaccaaatggacacaaaaaagtgattgttctactgacagatggtgttcccactttttcctaccaagtcagcaaagttcaaacagaaacgaatggcagctattacggcacccaatttaccaatagacaagaccagccgggcagtacttctcgtatttctaacagctactatgctccagaccaaagaaataccaataaattgatcaacagtacgtttatcgcaaccattggtgaagcaatggcattaaagcagcgaggaattgaaattcatggattaggcattcaactgcaaagtgatactaatgcgggattatccaaacaagaagtagaaaacaagatgcggcaaatggtgtctgcggatgagaatggtgatctttactatgaatcagccgatcatgcaccggatatttctgattatctcgcgagaaaagcggttcagatatctggaactgtggcaaacggcaaagtaaccgatccgattgctgaaccgtttagttacgaaccaaatacattaacagtcaaaagtgtcgggtcccttcaagtacaagccatgcccacactctcatttgaagggaacaccgttcgtagtgatgaaatttatttagggaaagatcaagaaattcagatccattatcaagtcaggatccagacagaatcagcaacgttcaaacctgatttctggtacccgatgaatggcagaacaaccttccaacgagtagcaacagcagatgaagtggtagattttggcgtgccatcggggaaagcaccaggagtcaagcttgatttcaaaaaaatctgggaagaatatgatcatgatccgagcagccgcccagaaaatgttatctatgaagtgaccagaaaacaagtttcagatacgacaaattggcaaacaggctacatcaagatttcgcaaccgtcaaatgataccggaagcttatgggaacgcactagtgtaacacagctttcaaagtcagcagatgatgcctatgccgaaaccttaggtctacccaaatacaataatcggggacaagatttcagctatcaaacgactcgagagctaactgtccccggttatgagcaagaaaaagtagatgaaacaacgtggaaaaacacgaaacagtttcagccattagcacttaaagtgatcaaaaactcttctgctggcgaaaaaaatctggtaggtgctgtgtttgaattaactggcaaaaatggccgtacgacattgatcgataatcaagatggcagctactccttgccgcaaaatgtccgactgcaaaaaggtgaaacctatactctcacagaagtgcaagctcctgctggacatgaacgtgggaaaacaacttggcaaatcgaagtcacttcagagggaattgtgacaatcgatggggatgaggtttctacagaagaacaagtgatcacactgaccgtggttaatctattttcagaattgccaatcggcattcgcaagtatacgctgcaagacggaaatgaagtaaatttatctggggcaacattttcgttgcaaaagaaaaattcttcagaccgttatcaaacgatcgctacggaaaaaacaacggattcaggggtagcccattttatattagatcagccaggtcaataccgaatggtcgaagattcaggtccattggggtatgacacgatcgccggcaactatgaatttacggtggataaatatggaaagattcactacgacggcaaaaatgtggataaacaaagtaaagaatggacgttgaatcatcaaaaccagttaaaagcctttgacttgaccgtccacaaaaaggccgacgatcagacgccattaaaagggacggaattccgtttgatgggtccaaatacagacattgaacgatcaggagaagagacggatacgtttgtctttgatcagttacagccgggaaaatatgtcttgacggaaacatatacgccagaagggtatcaaggattgaaagagccaattgaaattgtgatcaatgaagatggctcagtacagattgatggcgaagaagtcgctgatgtgttagttgctggagaaaaaaacaaccagattacactagatgtgaccaatcaggcgaaagttccactgccggaaacaggtggaagtggtcgattagggatttatctactcgcctttagttcgatcgccatcgctggtatctacttatacctccagcgattagaaaggagggggtagcggatgaaaagcatgcgttggtttagtgtatgcatttttctagttgtgttactaggtttctcccaacaagtttcagcaggagaaatgcaagcgaatgttcgcatcacgttacacaaggtactatttcttgaagggcaattaccccaggaacaaatcaattccggagaaggtacattgcttcaagcttaccgcggtttaaatgatgtcacctatcacgtatacgatgtcaccgattctttctatcaattacgggaagatggtgaatcggtggaagctgcgcaaagaaagttggctgagcaaggtcctgcagccggatccctgattgccgaaggaaagaccgagaagatccaaggagaagatggtttacttagcttcacattagcagccaaggacagccagcagcgggataaggtctatttattcgtggaagcagaggctcctaatgtcgtgaaagagaaagccggaaacttggtcgttgttttgccagttcttgatcagaaagggaatcaaatgaccacgattcatttgtacccaaaaaatgaagagaaggcatacgatttgccgcctcttgaaaaagaagtgcagtccaaaacctctgattttacctatggcgagagagtgggttatcagctgtcaacacatatcccagaaaatatcttggattaccaacaattccaactatcggatacagcagattctgccttatttctcttaccagaaacgatcacagtaaaagtaggaacatccgttatgacaggatatacacttcaaataacggatcatggctttgtcctggatttctctattcagcagctagaaaaatttgccaatcaaaaattgcaagtctcttaccaaatgaaagtaatgaatgcagagcctgacacagagatcgtaaatgaagggcaattgctgacagataaacataccatcaacaaaaaagttgacatacggactggtgggaaacggttcgtcaaaagagatagtcaagatccgcagcgaacattggcaaatgccgtattcgtcgtaaaaaatcaaacgggagcctatttgcatgaatcagcccatggttatcaatggcaaagagaaaaagcgggagctaaacgattcacttctgatcaagccggagaattttccgtcaaagggttaaaagatggtcactatttcttggaagaaatccaagccccaaaaaattacttgcttaatcaaaaagccattccgtttgtggttgaaaaaaattcctatacaacaaatggaaaagcagctaccccactggcaatcatcaacaagaaacatactggttttttaccaaagactaatgagcaacaagcaacaggattgatcttagccggtgtagcattgataggttttgtcattgctgggctgattgaccaaaaacaaaaacgaggagaaagaaaatgaaacaagcaaaaaaagtatggtacttactaagtacgctattactaacattacctatttttatcaatgggttgggtacagcagcttatgctgaggaaaatgcaagcaatgcccaaatcgtcattcataaaaagaaaatgaccgatcttccggatccgctcattcaaaatagtgggaaagagatgagtgattttgatcaatatcaaggtcttgcagatgtcactttccgcatttataatgtgacgtcagaattttatgcgcaacgagtagccggggcaactgtcgaagctgcaaaacaagcagttcaaggtctaaccccaggttcgccaatagctgaaggtataacagatgcagatggcaatattaccgtaaatgtaccgaaaaaacaaaacgacaaagatgctgtctacgtcatcaaagaagaaccaaaatctggggtagcggctgctgccaatatggtcattgccttcccggtttatgagatgatcaagcaatcagacggctcgtataactatgggacagaagaattatctacggttcatgtttaccccaaaaatatcgtttcaaatgatggggcattacatgtgaaaaaaagaggtactgctgaaaatgaatcgttgaatggtgcagaattcgtactctcaaaaaatgaaggttccccaagtacgaccaagtatattcaaggggtaaaagatggtctccacacttggacaaccgacaaaggacaagcaaagcattttgttactggtaaaagctatggaatcggcgaagatgattttacagaatctgaagagaaaactggtgaactaacggtgaagaatcttgaagtgggttcctatacgcttgaagaggtcaaagcaccgaacaatgctgaattgattgatgatcaaacaaagacacccttcactattgaagcggataatcaaaccccagtagaaaaaaccgttaaaaatgatacatcaaacgttgaaaaaacaacgcctaatttaaacggcaaagatgtagcgattggtgaaaagatcaagtacgagattgcggtcaatattccattaggtattgctgataaagaaggaaatgccaataaatacaacaaatttaacttagtagatacccatgatgatgcattgacctttgacaatacaccttcaggagatacagcctatgctctttatgatggtgatacactgatcgcatctgaaaactatcaagtaactgaacagacaaacggcttcaccgtcgctgtcgatccagcgttcatcccttctttaacaccaggaggtacattaaaatttatttacttcatgcatctaaatgaaaaagcagatccaacgaaaggctttaaaaacgaagccaatgttgataatggtcataccaatgaccaaacgccaccaacagtagaagtcgtcaccggtgggaaacgatttatcaaagtcgatggggatgtttcatccacgcaagctctagcaggtgcctctttcgttgtacgtgatcaaaatagtgagggtgcaaactatttgaaggtcgatgaagcagcgaaaacagtgacttgggtggcaaacaaagcagatgcaacaacattcacgacgcaagctgatggtttagtcgtcattactggactaaaatatggttcctattatttggaagaaactgcagcgccagaaaattatgtattactaacaaatcgaatccaatttacagtggatgagcattcttacggaaccacagaagaattagttgctcctgaaaaagtgcctaacaaacacaaaggaacattgccttctacaggcggaaaaggcatctatctttatttaggcagcggtacgctgatcttgatcattgtgggtttgtatttcatgaaacgaaaagaaactcgttgattttctgttttgctagattttcacttctagaaaaattggcagcctcaaaagcagatctcagctatttcgacctagtcagataaaaacgggaggttgcaacagacgtggtccgcttcaagaaataagaaaggattttcaaaaatagcttttcccatttttttgaaaagctatttttgaagaagctgattctaaccgcttgttgaaccacttgttcggaaaacggagctgtgacaagtcttttgtcacagctcctttaatttttttgaggaggaaatgatgaaacaaaaaagaggacaccagatagtcgatcgattgatgatccttttgttgttgattggtgtagggattttttcctatccattcattagcgatgcactgaataattatttggaccaacagatcattgcgcattaccaaacagaagcaaatcaagaaaatgccgccgcaatggcgaagttgcaagcgcagatcgacaaaaatcaacagctagccaaagaaggcggctcccccggactggatccattctctgaagcagagaaaatcagtaaaaaaccagataaatcgtattttgaaagccatacgatcggtgtgttaacgattcccaaaatcaatgtacgagtccctatttttgacaagaccaattcagcattgttggaaaaaggcagctcattactggaagggacttcttttcctacaggaggcaaaaacacccacgccgtcatttcgggtcatcgtggattgccgcaagcaaaactatttactgatttgccagaattgcaggaaggcgatgagttttatttagaagtctacggcgaaacactcgtttatcaagtcgatcaaatcaaaactgttgtccccaccgatacacaagaccttcagattgaatctggtaaagatcttgtcacattgttgacctgcactccctacatgatcaatagtcatcgattattggtaagaggacaccggattccttatcatccgaaagtcactgatgacataaagaaagtcaaacagcaacaacagcagtttctgtggatcctcatttttactgcctgcggcttcctcgttttttgtatttggtggtataagcggcgaaagaaaaaaactgggaaccctccagtatctagcagataaaatgagttggctgatcaaagaaaccctgtttttaataaaaaatttttttgatttacagggcataaagaaagctgatttatttgctagccagcacaatctttgtatctcttatgctatcgaacctcccgtaagatgttaagaggattgacaaaatattcgcaaacgctataatgagggtgtattagtggacaaggacgtctgctaatccttttgaaaactagctatcaaagaagatacaataaacgtatacttatgaagtgtcagggaaagaggtgtgaatcctctacagacctacctactgtatggtggatgaaaccaatagaaccacagaatgattctattctggaaggattgggagtaagaagaagctaagtcaggataccggcttgataagtctattcattcttttgtaggaaaaagaaggggcttcgacgataactggcttgatctactgttagtactgttaatgaaccactttttctattaaaggaaaagtggtttttttgttttttgatacaaagtaaaaggagggatagacaaaccgtaggaaagaagaataatcgatttatccgtaagggttggaagaaaaaattcaaaaaaagttgaatgcgaggaaaaaaagatgaaaaaaattctaatgacgatcatgaccatcggagtagttgctgggattggattagcgggttgcggcaaacaagaaaacgaagctacggcttcaactgagaaaacagaacaaaatttgccgacgaaagaccgtagtgggaaagagatctcattgcctaaagaggcaactaaatcgtttcactggttccatcagtaacagaagttattgatgatataggaaaaacgaatgaattggttgctgttgacatgcaaagcgggtcactgaatgaagcgcttcaggcattacctcaaatggatatgatggcgattgatgcagaaaaattgattgcattgaaaccgcaaatcgtctatgtgaatgacattaatttagcaagttctgaaagtgtctggcagcaagtagaagatgccgggatcacgattgtcaatataccgacaagtaccagtattcaagccatcactagcgtaacaacaagtactcagaaaagagccgatagttgtcctattcggacctcctcgatcaaaacaaagtcactatcacgaaagatagaatatgaaatacagcacttgaagcatcttctttattttcctatgttgagagatgacacgtttcctgcagaactatggctgtactttgagaaacaacaagcttggttggagaatatcattcaaggaaaattctcggtgattgaacaagcgattgatcaagagcaagtagtgatagagagcagtcagagaagacaatgggattattcttcaaaggaaatccaacttcaattgaacaaaatcctattcttgttcgaagaaaagcctgataggcgctatcagtatttccaagaatgggcggatgcgttgatccaaacaatgactgtagtaaaactgaactaggagatgaacacattggattcaatcaatgaaattgttgaagaagttatcaaacgaattcaactacaaaatcacacatttgaagtagaagattctggacgtcacgtccatttgtctcgtcgagaaatcgatcatttatttggatcagggtatcagttaacgaaagtaaaagatttgtcacaacctggtcaatatgtatgtaaagaacgaatcactgttgcaggaccaaaaggactgttccaaaatgtcgtgaatttaggtcctgaacgtaaggaagcacaagtcgaagtgtcaatgacagatacccgaattttaggtattaacgcgcctgttagagaaagtggaaagattgaaggaacaccaggggtgacattgatgaatggcgcaacgactgtttcattagatcgcggattgatcgtggcaaaacgacacatccatatgacaccagaagatgccctagcaaacaatgtgactaacggacaaatcgtccaagtaaaagtactaggcacgcgaccattgatttttgatgatgtagtgatacgtgtcagtcctcatttcgcgacgtatatgcatattgattatgatgaagcaaacgcttgtggtttatcaaaaggtgttcatggttacatcattaagtaagagaaggttggacaatgaaagcttctgaaatagaagaactggttcaacaaattactgatcgtatctgtcagcaactcccaaagcctacccttgctcttgctttttcgcaagagaaaaaagagattcctgccgaattatatacccagtttcccattgttcagtggagaaccggtgaagatcaagagtcggctggaatgattgtgaaacaactaacgatttctcaaatgtccagtattgctttactgcaagaaaacgatctattgacccgaagaatactttcatttttgttacaaggaaaaccaattcttgttttagaaactttgccagcaattccgaaagaaacaccgcttaaatatcaagtgaaaaagacaattcaagaatatcgagacaaatgtcagcagtttggtctgacattctatcgctccccgcaagactatgctgatttttggaaatcctgtcagaaaaaatcagtgcctaaggcattgcctaagcggaccttcatcaccgaaaaacaattgaaaaaaatgctagaataccgcattcctccaataaagaatgcgcaattgacaccattagcacaagattatgcgcgcactcaaaagttgcttataaagggggaaaaagcatgcttttaggaaaagttaccggcagtttgtggtctacaagaaaagacgagaaattaaacgggtggaaatttatgatggtagacattttgaatcaagaagaacaaaaacaaggctttattattgcagcggataatgctggcgcaggaattggcgataaagtattgatcagtcaaggcaatgctgctcgaatttctgctgaaaatccagaagtacctattgacgcaatgatcgttggcgtcatcgatgctgcagaggaagaataaggaggttgaatctatgagcattaatgaaattattatgtatattatggttctttttatgatcattggaggcattgataaatgcatcgggaataaattaggacttggaaaacaatttgaagaaggtatcatggtgatggggtctttagcgttatcaatggtagggatcatcacgttagccccggtcttggcgaatcttttaagtcctatcgttgttcccgtctatgaattgctgggtgctgatccggcaatgttcgcgacaacactactagcaaatgatatggggggatttgctctggcacagcaattagcaaatgatcctcaagcagggttatttgctggagcaatccttggggctatgatgggaccaacaattgttttcaccattcctgttgcgttggggattattcaaaaagaagatcaacagtttttagccacaggggtgttaagtggaattattaccattcctttcgggttattggccggtggtttaaccgcaggaatgccaatgtctatgatccttcctaacttgctacctatcattatcgttgctgcattgatcatcgtgggattatggttggcaccaaacggtatgatcaaaggattccagatttttggtcaaggtgttgtcatcgttgcgattatcggtttgattgtcggagcgattcagttacttgtgggaattacagtcattcctgacattgcacctgttacagaaggaatcgaagtcgtagggagcatcgcattgactttagctggggcattttgtttggttgctgtgattacgaaagtgtttaacaaaccgttaatgaaattagggaaagttttagggatgaatgaagtggctgctgccggtatggtggcaacattagcaaataatatcccaatgttccaaatgttgaaagatatggataacagaggaaaaatcatcaacattgctttcgctgtttctgcatcttttgttttaggcgatcatctaggctttacggccggggtagcaaaagaaatgatttttcctatgatcatcggtaaattagtcggtgggataactgctatttttgtagcgatttttatggctaatcgtatgttagggaaaccagaaatagaaacaaaataatgaggtgaaaatatgacagagtttaatcgtaaaatgatcgaaactttggttcgtcaaatcgtaactgaacaattgatgccaacaaaacaagtggatcctagcggtgttgcatcgatcaagctaccagagatcactgtttctgaagaagatcgtttggatacagggaaccccaatgatattgtttatacaaaggatttgttctcactcgaagagagtcctcgtctaggttgtggattgatggtaatgaaagaaacaacatttgactggacgctcgattatgatgaaatcgactatgttatttctggcaaattagatattattattgatggacggaaagtctctgccagtgcaggtgagctcattttaattcctaaaaatagcaaaatacagttttcagtcgcagaagaagcccgctttgtttatgtcactttcccggcagattggcagaatcaataaatttgttgaaaacaagacactatatattttcttaagttgatacgctacatcaggtgttccttttatttatagggacgccttttttttaaaagaccctttagttaattaatatacgtttggaagaaaagatgttttttacaaagcatacgtgccgatctgtaggataaaaacgaagttctatgtaagtagacaggacaaaacaaaaaacaattgaatgagtaactcgtatctattgttcgaaatagttgcaaaaatggtttatttcaaatatctttaaggagcaacatgcattaatcatagaagagtattaggacaaaaggcttggggaagactttttgtagacacctaatactcttcgtttttgtattttatcatgatatcagctagtttgtattaaatggacgaaatttcgtccaccatgttttgataggatcctcccatggtgaattctggcgtgatcgtacaactcaatgtttgttttgttcaggctgatacgtatcttcgatcagtgtgtggtcaagcttttcagtctaaattcaattgcttcatcgtaatcatttatgacaagagcaatattttgtttcacgattactcttcctttatagcgatgcaagtatcattctgagctaaagccaattattcgccacaatagcggactaatggaaatctaaaaaattatcactaaataagccaaataattttatttaacgagggatgtcagccttaaaataatagcgaaatcactaaaaatcggcgggatatagttaaaaataaaatggagaaaaacttgcctgctttacgctcgatctcatatcttcgatcatttctatcagttaaaactcggttagaaatcgagcccaaaatagtccgttagtaattttaagtaaaaaagcaaatagtaataagaaaagggttcccctaataaaagatacgatcactccctcacaatctgatgagtaagagcaaatgcttgctctgaaaagtttgttttatcgctatctgtactattaacctttagtgaatcatttaacttgaaaatatttaaggatgatcgtaagatagttttatcaaatatataaggagtgttatctatggcaaactatgaagaaaaagaatcaaaagcattgttaaaaatcggagaagttttggacaagttagattctaatttagcagaattggattctctagaagcagatgctaaaaaacatagtatgaagaagtggattgttgagaaaaaagcgattcatgaaatcaagaagatcgcacacgaagcaggtaaatacgaaacgtatgatgagaaagaattacaaaaagagttggacgaagtagaaaaatatatgtaaggaagagacgttttcttttcgtttttttctcttattttagttaaaataaatttccagcacactaaggataaatttgcttgatcaaagggaagcccgcttgcttgttttgtgagtaaggaggcttctttgcttatacaagcgactaaaagaatgcatctgtcgcgatgctggtcggcttgactgttaactgataatctcagagaaggcaggttaaaaataaaaaagaagcaagataaacctcatagaaacaaggttcatctcactttggaaaaactacgaaaatcttctcgattttagtctatggagatggcgggagtcgaacccgcgtccaaacatattgctacctaaaaatctacgctcatagtcagctcatttaaggattcgctttacagcttgccgagtgacaggcagtctgtattgctagtctgatgttctcttttttaacttgcagacggaaagttaaaacgtatcccacttagaataggacccttactcgagcacatgggcgatgccgagaggatctacgctaactgtttttaggcagctaaagcgtaagagttttcgtttttagcagttatatttaactgtaacgttttaacgtagacgtaacctacgaagcgcaattcaggctcaactatgcctgtcgaatccgtaacatccccctgataaaaggggtatcgctaccaatcattagtataacataatttgcgctatatgcaaagatttagatcaattcaaaatgattcaaggcatgcacgatgccgccttcagtatttttaagagtaacaaaatcagcaatctcttttagttctggcaagccattacccatggcaattttatagtcgcaagcttctaaaagagcgaagtcattgctaccgtcaccaaagccaaatgttggcacatctttgagatttagtaagttcaccaatgtcttaattcccgttcctttagaggtgccgcttttcacgacatcaattgaaaaaggtgtattgcggtagaaagtcaattcagggaactgttctttatagactgtttcattggcgatacctaatacgagcatcatattgatccggtctttttcataacggaatggatcgatttctggaagggggctgcggacataattgtaagcctcgatcatctcatcattgtgtccagttgcccagtaaccattctcgttataatatgaaagttcgtcgccatgatctctcacggcttccaacatccgtgcgcagagatttttatctaatgtgtctgaaaacacttctttgccatcgatacgaatgaatgccccattcatgacaatatttgaggtgatcccagcagcctcgcgaatagcaagaacttctgtttccgttctgccggttgcaatgattggtaaaacatcattttggcgtaagcgatgcatggcttcagaaatttcgggggtgatctgggagtgttcatctagtagtgtgccatctaaatcaaaaaatgctaaagctttataattcatacagttttctcctactcttattgacagttacaaaatcaatcttaacaaagattgctaaaaacgcaaacctttatgaagaaaccgtgaagttgttggtagataggaggttttcgagtatactagagaaagaatggagtgggaatatgatttttttagtgattggagcgattttctttttgatcggttttgtttttttgattctcccttcaaagaaaatcaattttatctacggctatcgttcttatttagcaaaacagaatgaacgaaattggcagtatgcacaaaagatctgtacgcggtattttctgctgtttgggggagtcatgacattgataggaatcctactgaagtggcagggatggaccaatttctttctcttagaaatgattgcaattccttggtttattgtaccgatttttggtttgatcgaagaaaagctgcaacaatttgatgaacaacataggggtgaagacaatgaatattctaatgattgaagacaatgaatctgtttcagaaatgatgcaaatgttttttttgaatgaaggttgggatgcgactttcaaatatgatggcaaagagggactggaagcttttgccgaaactccagaaaaatgggatatgatcacgctggatttaaatttgcctaccatggatggaatgatcgttgccagagagattcgcaagatttctaatacagtgcccattattatgctgactgcccgtgattcagaaagtgatcaagtgattgggctggaaatgggcgcggatgattatgtgacgaaaccatttagtccattaacattgattgctcgtatcaaagccctgcatcgacggagtgaaattgctgagaaggcaagttctgagacttcagacacgacatttgatatcgttaccgatcactttaaaatgaataccaagactcgggaggcttatttgaacggcaaattgatcgatggtctgacgcccaaagaatttgatttgctttatacattagcgaaaaaaccgcgacaagtcttttcccgggaacaattactagagttggtttgggattatcaatattttggtgacgagcgtaccgtcgatgcgcatatcaaaaagttgcggcaaaaaattgaaaaagtgggaccgcaagtgattcagactgtttggggagttggctacaaatttgatgatgcaggtgctgcctaatgcggtatctttatcaacaattgattgcgttttttgctgtgattctagtcattttgatgacgattggagtagcgtttacccaaatgaccagacagacgttgcaagagcgcaattacgagcaattgatggggtatgcctcttccgtagcaaaaatttcccagatcagtgactcagaattttttcagcagaacatgacgcgagatgaatatttgcagtattcactacatcttgctgaaaatattctgagcaatcaagatatttcttttgctttttttaaaagtccgaaagaacaaatctatccattagatacgtcgggacgagcggtcgactttagcatttcagaatcagattggcagtcattgcaaaatggtggtcgattacaaatgacttcgaataccaatttattcggcgaacgagagttgacttcctatgtgttgattcctttttctgttaatcggacggatttttatggcgtgatggtggtttcacaatctgccagcaatattttgaatctagtcagtgcttttaatcagaacttattcaaagtcttcttgatttcgatcattgtttcgctattgatcagttatctattcgcgactttccaagttcggcggatcaatcggatgaagcgggcaaccaaagaaattacgaatgggaattttgacatctcattacctgttcataatcgcgatgaatttgatgaattggcagaagactttaaccaaatgtcccagtcattgaaagagtcgcatgaagaaattgagcgtcaggaagaacgacgacggcaatttatggctgatgcttcccatgaaatgcgtacgcctttaaccactatcaatgggttgctagaaggattagaataccatgcaattccagagaatcagcgagacaatgcgatccgcttgatgaaaaatgagaccaatcgtttgattcgtttagtgaatgaaaatctggattatgaaaaaatcagaaccaatcagatttctatggtcattaagaagtttgatgcgaccaagacaatgaccaatctgttgacgcaattggaaagcaaagcagaagtcgcaaacgatcgtttgattctggaaacagaggagtcgatcgacgtctatgccgactatgaccggtttgttcaaattatggttaacatactccaaaatgcgattcaattcacacaagatggtgagatccgcgtgcgaatcgaaaaaggctatctagaaacgatcattgagatttctgatacaggaatcggtatgtccgaagaacaagtcaaaaatatttgggatcgctactataaagttgatccttctcgaaaaaatcgacaatttggtgaatcgggattagggttatcgatagtggaacagttggttcgcctccacaaaggtaaaatcgaagtcgatagcgaattggggcaaggaacgaccttcaaagtgacttttcccgatatcgaaatagaagaataagctagaaacatacagtatgcttttttgcagtgatagacaaaaaggaaaccatcgtcatcgatggtttcctttttgtgtacctataaaatagaaaagtctcattgttttgtgatatagggggtatgagccaagcgttcatcttcattcattaaatagatcgatagctgaaattgttttgctagttgactgcataaaggcagaagggcttggatgtcggcggtatgtaaattttttgaaagagtctctaaaactatgaccggtttttccaataaaagtgccagtaacaattgtactttaacttcttctaaagaagtgagttcatctaaggatcttttcaaaaaagtcggttctaaatgaacggcagttaacagctcttccaaaggtttttcttttttattggctaaggaaagattatctttcaatgatagaaaggggacatactgccattttggctcgatggtaaccgcttggttagtttgcagaaagtgtgccaacgtctctttcgcagcaaggtcattggctgcaagatagaaaagacctgggatgtttagttgattttttggtttttccattgctgattcctccaataaaaacagtggctggtgacgacgactaacgtaatgattgagactgaaccaacgagtaggacaaaggtttggcgtaaactttttagaatcattgacaaccattcattgctgttcaattcaacattctgaatgaatgcttggcttgtttgtggaatcgtaatgccgaaatccgctgttgtttggctattgaccgactgccaaatctgcaaggaggcatcttctctgtcgaaagttgtgatatgactggtaatcatttctcgttgaaagaaaggctgaaatagaatcagcaatgcaaagacgaggacgatgattgcaagcagtggcaggaggacttccaagagctgcattcctgcccattgccgcgaggaagctccgctcatcagccatgcctgaaattcctttcttttcattcgttgataaaaaataatgaaacctgtgaaaaccaataggaaactgatgaaaatcaacagaaaaagattctgataaatagatgcaatcggttggatctcttgtgcgatttttgccggcatttcttcaccaatcaaataatctttggcttgcataaataattggttcaatgagtggagcagagtatcactaatgattaaaccaatcacggcaaaaaaggtcaacaatccatagaggatcaatgcttttttatgataatgaatgctggctacagcaaaacgaaaagttttcattcaattcacctcattctactatctagtataaaaggggagtttgaataaagtatgaagttcttgtacaaaaaaaagaaagtcagcggagacttcttgattttttgtgcaaaaaagtaccgcgagcgatcaaacgctagcggtacttttgattgaagcttatttatcggtctctttgaccatttcttcgtattctttataggtcttcgtatgatacaaatcgacggtcgatttctcaccattttttgagaagacactcgttgaatcggcaccgagttctttttctttggcactcagtttttgtaaggcatttttgtaatcatagttatctggatcgacttctttcaatccgcttttcgcatagaagcgcaacagatctccattattgatttgatcagagaccgacagttgcttatcgactttggctttccattcatccacttgcttttgtaagcttgctgaaggacttgggatcgccatgccagtactgttactgtaaaggacgcctccgtaataagtatactctggtgtaacaaagtcaccgtctctaaatgcaacgagctgttcgttttgtttcgagaacaaatcttgtcctaattggatatatttcgaagtatctacacctaacagatgaagtaaggttggtaaagcatccacttgaccaccgtacgtatgattgattccgcccttcgattgtccaggaatatggatcatgtaagggacacgctgtaaggctgcattatcaaaattagaccagctagcgctgtctttaccaagcaattctgctaagtttttgtttcgcgaatttgaaataccgtagtggtcaccgtataagacgatcacagaattatcatacagaccagattctttcaagtagttgaagaattcttcaactgctcgatccaagtagttggcagtagcaaagtacccgttgatcgtttcatcagaagttgttgctaacgggaagccaccttcatcattggtaaattcagagtatgggtagtgattagagacagcgataaatttggcgtaaaatggttgttgcaaccgttccaagtattgcgctgattgttcaaaaaatggtttgtcatgcaacccatattggaatgagttatcttcgttgacatcatagtaagaagcatcaaagaagtaatcatagccaaagcgtttgtaagtctcgtttcggttccagaaggtaccagtgtttccatgaaaaacagctgatgtgtagccttgtgtttgtcctaaaatatctggtgctgcttcaaaggtattcttcccgccaagttgcgtgaagagagccccttgattcaaaccaaagagtgaattctcaaaaagtgtttccgcgtcactggtttttccagctttgacttgatgaaagaaattatcaaagctaaatgtgcttttactatgatacaaacgattaatgaatggcatcacttcatgttctacgccattctcatcttttaatttataatcgatcagaaattgttgtgtactttctaaatggacataaatgacattttttcctttagcgatcccgaacatgtcgtcattaggttctgcataatgctgcttgacataactttcgacttcgttcatatcattgggactagcttctgctcgaacttgagaagcttgatacgtctgcacgccatcataaacagtaaatgcattgatccctaaatatttgaccaggtaatcacgagaaaaagttctagtcaataattctggacgatctgcttcggctaagaacaaatttcctgagaagatcattactgctaatgttgaaatggcaaaagccatccgagctttaacgggacgctgatccattttgattttcttcataacgagagcggcaatcaaaatgacgaagtccacgaagtacaataaatcgtaaggtctgaaaagacgaatcgcactttctcccagaccactagcaacttttccggcaccaagcatcgtattgatggtaatgaaatccgtgaactctcgataataactgacatttgagaacagtagcagtgtcatcaagaaatagatggcgatcatggtgatataggctgcttttgttcgtctcacatacagtgcgatcgaaagtaaaaataaagttgttgcgattggattgataaataagatgaagtattgcacagtgctttcaatcccaaggtggaagtccaccaaataagcaaagatattttttaaccaaaataatagggccaatatgaaaaaaaagcccattcttgtattcacaaaagtggatactctattttttttcaaaggaatcttcctctctctttccagcttaaacgaataagattcgaatttacatcatcctatattctactagtccatcgaaacagtgtcaatcgaattccctgtcgtggtgcggaattaagtatttctttactttcaagattacagacaaagaaacaggtttttgctatacttatcaatagaatgaatggagcagataaacgatgaaaatgaatttaagcaaaaaaggaatcaaaaaattccataaaaaaaacccattgatccaagaagatgatctcctgcaagtcaaagatacacaggattgggtctcttttgtcgattcgcaagggaaaattgtcggaaccggctatttagggaaacagaataaaggcatcggctgggtattggcttttgaagatcgtccgatcaacaaggacttttttgaagcagcttttgcaaaagccaaagccaaaagaagtgcttactatgccagcgaagaaacagatgcttttcgtatcgttaatggagaaggtgaccacttaggtggattaacgattgatctctatcgagaatttgccgtattttcttggtataacgaaacattgtaccaaaataaatctctattgatccaagcgttccaacaagtttttccagaagtcaaaggagcggttgaaaaaatccgctttgactctgatctgccagaatcagcagccgtctatggagaggaggcgcccgaaccgctgattgtgaaagaaaatggcgttcactatgctacctatcttaatgagggactgatgaccgggattttccttgatcaaaaggaagtacgcggacaactcgccgaagggctgtcagcaggcatgacagtgctcaatatgtttagttataccggtgctttttctgttgcagctgcgatgggcggtgcgacaaagacaacgagtgttgatcttgccaagcgcagtttggagaagaccaaagagcagtttgcaatcaatggctttgatccagaaaaacagaagattcatgtgatggatgtttttggctattttaagtatgctaagaaaaaagagctgacctttgatatgatcattttagatccgcctagttttgcccgcaacaagaaaaaagtcttttctgtcgcaaaaaattatggtgaactggttacggatagtttggcgattatgaacgaggaaggcttgttgattgcttccacgaatgctgccaacctttcccaaaagaagtttcaacaaatgatcgaagaagcaatggatcaggcacaagtcacatatcaatgtatacaagaatatcgactaccaagtgattttgcagttgatcctaactttttagaagggaattacttaaaagtattcttttaccaaatcaaaaaggagtgagacggatggttcaagtaaagtcaatcgagttggatggcaagcacccgcgcatttgtgtgccgctgaccggaacaactaatgaggagattatcaagcaagccctagccgcagaaacttcggatgcagagatcattgagtggcgggctgattattataaaaaagtcgatagtttatccgacgttctggatgtactttctcacgttcggaccactctaaaatcaaaagtttttctgtttacgtttcgaaccatcgaagaagggggacaaatctctttcactttgacacaatataaacatttatgtctaggcgttgcagaatctggattgatcgatatgattgatatagaactggaaaaagctgagtttttaggcagaaactttattcagaaaatcaaagaacatcaagtgaaattggtgttaagtagtcacgatttcgacaaaacaccagaagatgctgtgttgatcttaaaaatcgggattatgaatcaatttggcgctgatatcggaaaactagcaatgatgcctcacaatgtgcaggacgttttgcgtttgatgggcattatcaataaagcgcggggattcaatcaattacctttagcagtcatgtcaatgggaaatctaggcaaaatcagccgcgtcagtggtagtctgatcgattcagtcatgacttttgctgcgctggatcaagcttctgcccctggtcagattccagtggagcggatgaaagattatttagctgagttttcaatcgaaacaatgaaaaattaaacaatcgggaacataaacagaaaaaaatgggacagactagtcctatagtttcgagcagtcttaaatgagactcttaaaattgaagttgtaaagaaagaaccagaagtttggataaatgaggaatgcgtcatggcaaaagtaaaaaaaacaaatgcgattcggatggtagaacaaaagaaactctcctatcaggaatatacgtacgaatggtcagaagatcatttggatgcagggtctgttgctcagcaaatcgctcatccagaagccatctataaaacgctggtagcagttggcaataaaacgggtcccatcgtcgcagtcatccctggagatcacgaattagatttgaagaaaattgctaaagccagcggcaacaaaaaagtagaaatgttgcacttaagagacctagaagagaccacagggtatattcgcggtggatgttcaccgatcggcatgaagaaactctttccaacctatattgatgaaagtgcgcgacatttggaagaaatcatcatctcagcaggaaagcgtggtttacaaataggactgtctccaacagatttgagcaaattagtccgcggacagtttgtctcgctgactgctatttctgaagttggctaaacaggaacagacaaaacaacagagccgctgcattgaagtaggatacttcaatgcagcggctctgttgtttgttctatggacaattattccataacggaaatatcaaagacttcaatattatctaatccaccataaaattcataccatggggtagcatattcttttagaatagcattcagttcttcgacattttcccggccttgcgtatctaaccaatcaagcagtgctttttccccttgttttccatagatttccacgctgtctcgccaagttgcacgtccgccaagaataccagagaactttgccccgtgttcgccggcaaagcgtaattcttctcggaagatgtttgcaggaacccctgcacttaagtaaatgaaaggacgagtagcggcatcgctagcttctctaaagtagttggcagcttcttcttgggtatacacagcttctaagccttctttttgaaacccttcaaccaaatcaaattgtacgggtacttcaacttttaaaatatcgatatggtatttgtctttggtcaattcttgaatcgttcgaatgacttttccaggtttgattttagcgaaagccggtgatttatcatcggtgatttcatcgtcgtagacgattggttcgacaaaaattgggatatcggctgcttgtgcttccgtacctaaacgttctagaaaagcatgtttcgtatcaagaatctcttgcggttcatcaggattgtaataaaccagcactttagctgcgtcagctcctttttggactagacgttgcagagattcatttggcaacagctccggcaatcgtcctggagtattgacatcataaccggttttttcataagacagaatcaaaccagcattaggatttttcgcttcgatgccttgaaatccatattcttcatccaataaaatgctgctgacatactttgtcaattcttgtgaaaccaaccgtttgaagtcataaatttgttccattttgaaattatcgggccctgtggcagctttcatcatttttttcattgatcctcgctgatcaatggccaatgccgcaatcaccccatcttcatttgaaagtttctgcattttttcaaatttgcctcttgaaatacgtttcatttgtccagcctcctttaagttctctttcagtctacgccttctcacaaaaatcgccaactaataagcaatttctagaaatgcaaacaaaaaaacgaagctttgtcactaccccgcaagcaatgggatgtgacagcaactttactcagatgcaagtctgcgaaagattcgaaattccttgtatttcattgtgtcagatcgttaagagaataaagactatccttgtgaatagtggaaatagctcgccatttctgccgcatgcttgccagcgacatgaccagtacaaaaggcagcagtgatattgaatccaccggtataaccgttgatatcgagtaattcgccgccgaaataaaggccattgatgcacttactttccattgtcttgggattcacttcttttaaatgaatccctccacccgtcacaaaagatttttccagcggaaatgttttagaaattgtgacagaaaagcctttcatgatagctgctaaagcctgtagctggtcttcagttgtttgctcagccaccagatcagaaagtgccagtcgatggataaagaactctagcagacgttccggcaagatgccgctcagtgcattgactaattttttcttcgaatgggctgccactgttagctcattcaccaattcattcgctgttttttctggaaaacaatccagcatcactgtgacaggtgtatgactcttcaattcttgattgacaaaagaagagcagcgcagtgcagctggacccgaaagcccgaaatgcgtgaacaagagatccatggtatgagagacaacggtttttcctgtagaatctaaaacagataaagcaatatcttgtaaagagatgccttgcagtgtgcgttctttgataaatggctcctctgatatgaggggagactcggtaggataaagcggtgtgatggtatgccctacttttttggccattttgtagccgtctccagttgctccagtcgaagggtaagttcgaccaccagtcgtcaggatcacacagggcgcagtaaattcttcgaattctgttcgaacgccttggatctgagtctcatcatgaagtaatttagtgacgactgtattggtcaatagagtgacttgtttctcatggagcgcctgtaataagccttcaacgatcgttttcgatttgtctgtgacaggaaacatccgtccgtgatcttcttctttcagagggacaccatgggattcaaaaaaggtcatcacatcgaaattattgaattgcgagaatgtactatataaaaattttccgttgccgggaatatgggcgatcaaatcatcgacagagcgatgattggtcacgttacaacgaccgccgccggtcataagcaattttttgccaacttttttatttttttctataagtaatacgtctgcaccgttttcggctgctgaaatagcggccatcatgccactggtcccagcaccaatcacgatcacatcataggatttcttcatcttccttcacctctttgtggattgtaccatattgcaggaacaagcggggagaaagctgtttgttcaatgaatcgaaaaaaaattctgacaatttcgtaaaaaatagatgcaatttctgaaattttctataaaatagaatttaactaaaggaggtagtgcctgatgacaaatgcttcagagtatgtaaaagcgatccaagagaaactgcacgaaaaagatcagaaccaaacggaatttttacaagcgatagatgaatttttaccaacaatcattcctttcttagaaaaacatccagaatacattgaatcgaatttggttgatttattaacagaaccagagcgatttattcaatttcgtgtgccatggcaagatgaccaaggcaattggcaagtcaaccgcggttatcggatccaatttaattctgcattagggccttacaaaggcggcctgcgttttcatcccagcgtcaacttaagtatcttgaaatttttggcttttgagcagattttcaagaacagtttgactggattaccgattggtggcggcaaaggcggaagtgactttgatccaaaagggaaatcagatggagaagtcatgcgtttttgtcaaagtttcatgacggaattagcaaaacatatcggccctgacttagatgttcctgcgggggacattggtgttggtggccgtgaaattggctatctctttggggcttacaaacgtcttaaacaatatgatgctggtgtccttacaggaaaaccattggacttttggggaagtaaaaatcggacggaagctaccggttacggggcagtctattttgttaagcatctgttgaaagatttaaaggaaaacttccaagggaaacaggcaattgtatctggaagcggcaatgtagccatttatgcgattgaaaaattgcatgagttgggcgcaaaagccatcacttgctctgattcttctggcttcatttatgacaaagaaggtatcgatctggcattattgaaagaaatcaaagaagtgaaacgggaacgtttgacagcatatgccaacgcacgcacctcagcagagtaccatgaaggcgcttctgtctgggacttcgatgttcaagcggaattagcattcccttgtgcgactcaaaatgaaatcaatctagaacaagccaaacgggcaaaagcgaatggtgtccggattgtttctgaaggtgccaatatgccaagctctcttgaagcggcagaatattttattgcgcaaggaatctactattgtcctgggaaagcggctaatgcgggtggcgtagcggtttctgctttagaaatgagtcaaaactcacaacgtttgcagtgggagcaggcagaagtcgatcaaaaattggatgagatcatgaagaatatttatgatgcttgccgtgacactgcagaagaatttgatcaaaaaaataatttcatgctaggagcaaatgtggctggatttgaaaaagttgctaaagcaatgttttctcaaggacttgtctaactctgccagataggcgatataataaggaattacttgaaaaaagttcaaaaaaaacgtaaagtagtacttgtatgaaaaactaatttttttcaaggaggacaaatcatgtcacacatcaaatttgactattcaaaagtagcaccattcgtgaatgaatacgaattaagctacatgcaaagtcaagttacagcagcagataaactcttacgtgaaggtactggtgcaggtaacgactttttaggctggatcgacttgcctaaaaattatgataaagaagaatttgcacgaatcaaaaaagcagcagaaaaaatccaatcggactcagaagtattagttgttatcggtatcggtggttcttatttaggggcaaaagctgcgattgatttcttaaaccattcattctataacttgctttcatcagatgaacggaaagcaccacaaatcttttttgccggaaactcaatttcttcgacttatttagctgatttgatcgaaatcatcggtgatcgtgatttctctgtcaatgtcatttctaagtcaggaacgacgacagaacctgcgatcgcattccgtgtcttcaaagaacgcttgatcgaaaaatatggcaaagaagaagcaaacaaacgtatctatgcaacgacagataaagcaaaaggtgccgttaaagttgaagcagatgctgaaaattgggaaacattcgtaattcctgatgatgttggcggacgtttctctgtcttgacagctgtaggtctattgccaatcgctgctagcggtgcggatatcgatgctttgatgcaaggtgcagcagacgctagtgaagcatatgccagtgatgaccttgaaaaaaatgaagcgtatcaatatgcagcaatgcgtaacatcctttaccgcaaaggaaaagtaaccgaattgctgattaattatgaaccaggaatgcaatacttctctgaatggtggaaacaattatttggagaatcagaaggaaaagaccaaaagggaatttacccttcaagtgctaacttctcaactgatttgcattcattgggtcaatatatccaagaaggccgccgcaacatctttgaaactgttgttaaagttgaaaaaccacgtaaatcaatcacaattcctacgcaagaagctgaccttgatggacttggctacttacaaggaaaagaagttgattttgtaaataccaaagccttcgaaggaacgttattggctcacacagatggcgatgtaccaaacttattggttaagatcccaacgatggatgcctacacattaggttatacaatgtatttcttcgaaatcgctgtaggtatttctggttacttgaatggtgtgaatccatttgaccaacctggcgtggaagcttataagaaaaacatgttcgcattgcttggcaaaccaggctttgaagagcttgcaaaagaattgaacgaacgtctataatttatcgttctaactaaaaagaaccagtcctccgatcattcttctgagggctggtttttcatttatataagcggatggttcagaataaggacgcttattcatttaaccataaaatgaccgtcacaatagggcattaatttgtggtctttaggaacagttaaccaatcaaggagtcatcaacgattttcctttaaaccaatcaataatgcgactgtcaagagaccaaaaatacatgtttggattactggcattctgctcatctcctttcctttatgttactaggactttctggaagatgcacgaacacaccagtcataagaagcgaacgattttgtcatcttgtctgcggaaataagtaggtgccaaatttatcataaaagcgcttgcataaatcggtatttttgttattatatttttagaaaagaagttctgaggtggtaagatgctagatattgaaattggaaatgcctatgtgtgtcaacctattggggcaaaaaaaacgctagtcggtgtaattgagaagctgtatgagcatacggctcttgtgaaagtgaccgattatgagatggaggatcaatccattgtattggagtgcaatcagcggatgttggtaaaatttgataagattaccgcagtggctgtggcttaataaaaacaagactggaactcgctaataaaaatgtattatgtcagcatgccgaaaagtcagcttgtaggcactgattcatctttattgactagagtccagtctttctttttagctggcgtgaattagccgacgccgatcacaaagttcagtagcttatctgagtaagtcatttcatcggtggactcactgagggtttggttcaaaatatccatccgatcggtaatgatgccgtccacaccgtagaactgcatccgactgatctcggcatcatcatttggagtccagacaaagatatctttatgatccgttttggcagatgaaacaaagttgcggttgatcgtactatattccatcgttaaaaaatcagcacttgttaatggagggccaacgatgttgaagggcatgatatacccagcagttagttccggagcctcttgtttcaattcttccactacattataggtcaagctttgtagaatatgttcatgttcggctagattttcacggtagcgttcaaggaatgaatggactaatgttgtcgtatcttttcgttgtgtcttgatttctactagcaatttctgattcaacgaattcgctaaggataaatagtcatcaaatgtagcaatcggagccgtttgtccattttcagagacggttaatttttgtgcttgtgccaaagttgattgctccggtttctgattgaagccagtcaacgctttaaatgaaaaatcgtgataaacaatgaaatgaccatcgctagtttgttgaacatccatttcaacgtaatcaggatggtagttctcactagtgaagcgcagtgcttctaatgaattttgaacgccttgaccattgctgacgccgcgatgcgagatcgtcaatggtcgagtattagcggcagaggtcagataattcatgttgtataaacttactcctaccccgaagaagacggctactacagtaatcaaagaggcttttagtcgttgaaaatttcttgctggcaatggttcttcactgaaccattgtggtatctcaggtaagaaaccttcatcgtccataaaatcaacaatgatatagaagatggcaacggtagacaaaatgatattcaacaacaaaacgagttgaaggagcgtcataatgaagactgctgaatacagcgcatagtcagcgaaaagttcttcaatgatcgcttgcaggataatcaaaaaagtaaatcctactgttgaaatgaataagatcgcgccgccaataaagacaaattggccaacaatcgcaaagaaacggcgtttcgttgtctgcaaactttctcgaatggcctgtcgaaaaggaaggtcacgtaagatcatttctggtaaagcaaaaatcacacgaatccctagataaatcaaaagtaagtagccaagaaccacggctccgataatcaatacacgattcgtaaagatgaaatccatgataaaagcagggattttcactttagagagcaaatctgagttaaaacttagcccgccaattggcaaaatcaaaaagaaataaaacaagaaaaacaaaaaggtcatggggcgtaatttgcgaatttgtaaaaatgtcattcgcaacagctgtcgcaatcggaccggctgctttttcttgatgaaatagacactcagaagcaggaatgtaaactcaaaaaaaactgctaataaaatcaacaacaagattagagagagcgagaatagaaccattggatgctctgtaaaaatactacctatattgtcgaaagataaataggctaatcccccacgacgcaggataaattttgttgaagaagaaagcagtgggataaccaaaaaaagcaagaaaccatgcattagcagaacatctcgaaaataagcatcgcttgcctttagaaaatcccaagtgttgatcaaactattttttagatatttcatgttgttcatcctaactctagactataaaaaaccgaactatcgtgtttgattcctgtaatgaaaggaatgaccaccatctatagttcgggaatttcctgtatttatttttgctattaagcccggcacttagccgcctaatagccctgttaaaaacgtaccgccataaatcaatgccatactatataagaaaatcgataatggttttgccaataaaatgatcaaagtgaatttcttgactgaaatattcgttagtccagccattaaacacaaggcatcatccggggctaccggtaaaaagatagcaagtgcaaagagtttttcaaatcgactttggttatccaaccagccaatatatttatcatatgttttatcactgatcatactgaggataaatggtttaccatatcttctgccaagcaagaagatgatcactgaaccaatactaatgccaacataattgtagacaaatccaagatatggtccaaaaatcaagacgccagccgcactggatatcccaccaggaatgatcggaattacaacttgtaaaatttgtagcagcatgaagatgattggtcccaaaataacagagttgcctaccaaaccacgcagtgcattaatatctttaaagacacctagattaatgaagtaaatcgttaaggcaatagatagccctaatcctataattgatatcgtattaatgatacgacgagaagtggcgatactcacagactttcatctcctttattcgtttctaattccactatacgtggtgtaattagaaaaatccagcaaaataaatgacattcgtcaaacaaatttgtaagatttgatacccttattataaaagaagaatagcaagaaggcattgtactaaagtctgaaataagaaaaatttagcaattcatgtacaaattatcacgagtgatcgataggcaagttgttttcatccttagttattgctttcattttttatatttatttcctagttgtctcctctttatcaagtcgtgctcttcgtttgttttgccaacttgcgatggtcttttcaacgacactcgtcatcataaacccgcccgcgattgctcctgcagtgatcaaaacaatcatgaggttttctaatcccaaaaggttatctcccaaggcaaattcacgaacagctttataagccggaccaccggggaccaagggaactaaactaggaatattgaagatgatcatgggcattttcttgcgtcgtgaaaaaaagatgctgacacagccaaccgcaaaggcagcataaaaattggcactaccaatgccatgacccatttcatgcagctgccaataaatcatccatccaacagttccagcgatcccggttgcaatcaatgcacgtttcggtatatttgttaatatgccaaaggtgacggtacttaaaaaactaaaacagacatgaatcaaaatggtcatgataaccccccaaacaaggtgaagactgtagcgattcctacgccgattgcggctgcagtaaagatagcttcagttcctcgcgcagttccactgatcagatggccagctagaatatcacgaaatgaatttgtgatggccactccaggaactaacggcatcacggcaccaatgatcaggttgtcaacatttcccgccaagcccccgcgaacagataggatcgctaagcagccaatcactaaagaggcgacgaacatatccaaaaagcggatatcgatcgcttttttcacccagagacctgtaatgaacccgatgctgccaatgaaaaaagtaacaatgaaatcagaccaattgccgccaaaaataatcattaatgtactgctgaccactccagcactcaatacttgtaaccagagaggaaagcttggtgtgacttgattgatctctttaagagatgcatacaactgcggtaatgtgatctgtttttctgcgaacgaccgggaaagccgattgacggccactattttctccaaattgatcacacgatcatgaacattttcaacttgagcgtagtgactgcttcgtaatcccataaagatgcctgtagcggtcacataactgatactattggcttcgccagcgttagcagcgatacgattcatggtatcttcgactcgataaacttcggaaccattctccatcatgatttttcctgccaagaggcaagtttctaacaataactcatctgtttcttgcattttaacgcctctctatcttgaaaagtaatcctcctattagtttacctttttcattccaattcaacaagagaagtatccggtgagttaaataactaataataaagaaaatatcttatttttttaaagcaaccattttatttaaattggtaaaaaacttcacaaatagcggtgtggatataattgtagaacaattcagacagttataagataacgaaatgagtatattgtttttcaatttggaaaatctcggttacaattagataaaggaaaagggggatttattgatgcgaagaaaggtctatacaagagaacatattttgaaggccgcgtatgagttgatcaataaagaaggatttggcaactttaccgcccgaaatatagcaaagcaaatggggatttcaacacaaccgatttatttggaatttgaaaacatgcaggatttgaaaaacactttagttgaagcggtcttcaaagatctttcagaaaacgtgtttcctgttgaacggactggtgataaagtcattgatttaggattaaactacattcacttcgcacaagaaaaacacaacttgtatattgctcttttcgtagatgactatggcggagggaaattgatgcacgatttttcgtctgattatttcaaaaaattgatcaagtccgaaccaaagtatgcggatctatcggaagaagcgattacagccttgcacaatggtgcttggatcgttgttaccggcattgcttcattgatgtcagctggaatcattacgccaacggaggaacaaatcattaaggtgatcgaggaaacgatcactgggattttagatagaacagacatttttatttttcaataataacgaatctgcaaccattttttcggatggattgcagattttttcttgactttttctgaaaaaagtagaaaataaacgttatggagagttggcagagtggtaatgcagcggactcgaaatccgccgacccggttcatcccggcgcgcaggttcaaatcctgtactctccttacattaacgctttgaagcgtttggcctatccttggtgataggctttttttgttttgtaagtaaagacatggggaggaggggcccgaggtatgagaaaagcatcgtacacgactcataaaatttaattaatgagttgattcaggcagcagtgagagcttaggaaacgagttttgataatgtcatgccattgcttctttttttgaacgaaatcgattaaactagaagaaagagaacaagaaagcagaaggtgataaaatgtctgagtttgaaaaagattatgtcatgcgccaaacgaaattagctgttaagggactatccgtttttttgaaggatgaatcagtagatgagatcatgcagttggatgaacagcagagtggacaaaagaaagagccagaagaggaaaagcagttggagtagctgtttaatttcataacaaaacaagaaagcacctgctattagtcttagcgaggtgctttcagtacgaatcggtatccttcatttggatgaactccttatgcagttttagtcaattcttgtacagcttgttcgatcgtcacaccagttgcaaaacggttagcatcttttttatcaaaaacgataaaaaggttcagttttgtatctagagtaactcgatattgtagttctgtgttatagaatgtcatagtcattctcctttcagtgttattcgtaacgaaaggcaacggttaagttgataacgaaattccatgatcagaataacacgttgcttggcgtctgtccaataataactgaatggtagaggaagtttactaaaatttattaaggagaacagaagttatctaaaaaaatcaaataacaaatttgtaaggaagctcctttagtatctgagtaaaaagcggtatgaagcggttttgcttgaaaaactctttttgttgggttaaataattaatttattatatttttttaaatttaattttattcaatttatggtaagataagatttgtttcagggaaaataaaaaaggaaaatgaaaatggatgtgaaaatatgtgcggaattgtaggtttcgttaatactaaagaccaaaaagccgaaatcattgaacagatgatggatcgaatcattcatcgcggtcctaatagttctggaaaattcattgatgaccaagttgctcttggctttcggcgtttatcgattattgacttagaaggcggtacgcagcctatttataatgaagatggaacgaaagtaatcatttttaatggtgaaatctataactttcaatcgttaagagaagaattgatccaagctggacatgtctttacgactcatgcagatactgaggttcttcttcatgggtatgaagagtggggaactgatttattgcaaagagttcgcggcatgtttgcttttgccatttgggatcgcgaaaagcaagaactttttggggcaagagatcatttcggaatcaaaccttattattacgcggaaatgaatggtacattcatgtttggttcagaaatcaagagttttttaccacatccagattttgaaaaagaattgaataaggatgccttaaaaccctatttgacttttcaatattcgccactaaatggcgaaacattctttaaaggcgtttatcgcttacaagaaggtcactattttacttataaaaatggcgtcatggacattcatgaatattgggatgcagactacagtcataaagaaaactatagcaaagaagattgggtccaaaaaatcgatgataccgttcaagaatcgattgctgcacacaaaatcagtgatgtagaagtagggtcatttttatcaagcggtgtcgactcaagttatgttgccgctgttctgcgtccagatcattctttctcaattggattcgatgacaagacctataatgaagcaattgaagctagaaaattgaccaagatgctgggattgaacaatacagcagcggtgattgatggcgagatgtccttcaacgcttttccactgatccagtatcatttggatgagcccgactccaatccgagttgtgtcccgctctactttttagctaatctcgcctcgcaacatgttcgtgttgtacaatctggtgaaggcgcagatgaattatttgccggctatgctgcttatggttggcatacgaactccaagatgattcgtgtatttgctcaaggattgaaaaaattacctaagaatattcgattcaaattaggccggacaattggtaatatgagaaacttccatggacgaattcatctctatgaagccaccgcacctgcaaaagatttctttatcgggcaagcgctggtctttgaagagcaagaagccactgagatattgcatccagactatactagtggaccatcagtggcggaaatcgtcgccccatactatgaaaaagtcaaagatcttgatgaagaagtcaacaaaatgcagtatttggatgttcatcaatggatgcccaaagacatcttattaaaagcagataagatgtcaatggctagttctttggaattacgggtgccattacttgatattgaagtcatgaaagtagctcagacgattccgacaaaatatttgatcaatcagtacaatacgaaagatgtctttcgtcaagcagcaaatcgtcacctcccaacagaatgggccaatcgggaaaaattaggttttccggtccctattcgagcatggctgaaagaagggactggttacaaaaccgtcaaagaactatttacagcggattttgctgcagaattctttgaccaagaaaagattttgcaattattggctgatcatcgcgccggtaaacaaggacttcaacggaaaatctggacgatctacactttcttgacctggtataaagtattcttcattgatgaaaaaattcctaaggcagaaacaatcatttacgaaacaatttaaaaacacgaggacagatgtagtccctctaaagtccattttcatacagactttggagaggagagacatcgaatcctcgtgtttctttttgtctttttatagggctaataaattttccaagtagtcagctaagccgtcttcggcattggttttatccgttacatcattggcaatagattttaattgtgcggttccatttgccatagccacaccccagccggcatattccaacatttctagatcattgtgttcatcgccaaaggcaataatatttttgggatcaatcttcagataatcggaaatcactgatagacctaatgctttatggaccccttttggaacaatctccaaaattgcatgaggaccgccccatgtacggacatcaaccgtgtcattgaattgatcgttgattcgtagagcaacagactcagcgaattcattttgtgttttgaccaataatgaagtcggatcagatttcatgttcttcaataagttttcttcagtaatactatcggaagaaaagaaacgctgatcaaagccttcaagttgatcgataaaaaaggtttcccgattttctgcagcaacaaaatctaagttcaggttctctttttgagccattagttcaaaagcgatttcttttgacacagagaattctgtttcatttgcccatacttgacgaggtttgtgtaccaaacctccattaaaattgatcataggtgtttttagggctaattgacgataaaactgatcactcattcgaaaaggacgaccggttgcgatggtcacataatgtccagctttcgttgctcgtgtcaaaacatcaaatgtccgctttgaaatttgggactctgtatttaaagtagtgccgtctagatcgatggcaattagttttttgttcactcgactcgctccattctctttttctagttgtttaagtgtaacacattttactgatttcacaagagatgaaagggggatggtaagtttctggaaaaaatcagcttcttgataaaacacgaacgttcggataaaatatttggtttttgttaatttttttattgtagaatagggggaattcgcctataatttgtaattgttcgatggaaagtgcaattattcttttcttttcagaaacactaactaatcttgtaggagtgaacgatttacatggaaaagtttttcaaattaaaagaaaataaaacaactgtttcaacagaagtgatggctggggtaaccaccttctttgcaatgagctacattctttttgttaatccttcgattctttccgcatctggtatgccttttcaagcagtctttctggcaaccatcattgcctctgtcattggaacgctggtcatgggactctttgcaaacgtaccgtatgcgcaagcaccaggaatgggattgaatgccttctttacctttacagttgtctttgggttaggttattcttggcaacaagcattagctatggtctttatctgtggtgtgatcaatattttgatcacgatcactaaaattcgtaaattgattattcatgccattccagagagcatgcaacatgccatcggtggtgggattgggatcttcgttgcttacgttgggttgaaaaatgccaatctattaagtttcagcgcggatactgcagcagttactggatcaactgttgatggtgatacgattgttagtgcttcatttaatggaggcatcgtgccggcactcgctaactttaataatgcaccagttatcttggcaatcattggcttggttttaacaacgttattagtggttaaaaacgtccgaggagcaattattatcggtatcttagggacaacgatcattggtattttgatgggtgtggtcgatttaagcacgattgattggcaaggaaactctttgggaagttcaattaatgaacttggaacaacttttggcgctgcgtttggcccagagggaataggttcattgtttagtgattctgctaaaattcctcaagtgatcatgacgattattgcctttagtctttcagatacatttgatactatcggcacatttattggaacagggcgccgtactggaatcttttctcaaaaagacgaagaagcgttggaagatagtaaagggttcaatacaaagatggacaaagccctttttgccgatgcaattgcaacttcgatcggtgcgatctttggaacatctaataccactacttatgttgaatcagctgccgggatcggtgctgggggacgaacaggattgacttcagtggtagtagcagctttgtttgccattagtagtttcttttcaccattgatttccgtggtccctgctcaagcaacagcgccggcattgattttagtcggtgtgatgatgctcgcttcatttgcggatatcaattggtcggatcttgaagaagcagttccagcattctttgcttcgatctttatgggactttgttacagcatttcttatggaatcgcagctggttttatcttttacgcaatcgttaaagtcgtaaaaggaaaattccgcgaagtatctccaattttgtgggtcgtaaatattctctttattttgaacttcattattttagctgtgatcagctagtaccaatcaataaagagcactgatttctggtcgtgcttttgacaatgaactatccaaactataacggattctttctttggtcgatgagctgctttatgtgggctgtaaagaacaaagaaggcgaaatcggttgtagtggggatagttttattttgtagacagatcacacaatcttctgtcttttttaattttactattttaaaaaatgcggtatagtttaagagaaagagggttttgacatgaaaattgattggaaacgaaatctcctaatttcttggattggctgtttttttactggtgcaagttttagtttagttatgccgtttattccgctatatattgaagagttgggggcgccaaaaagccaaatcgagctgttttcaggtctggcaatctcagtgactgcgtttgcagctgcaatcattgcaccggtttggggaaatttagcagatcagaaaggtcgcagattgatgatgattcgggcggctgctggtatgacagtcaccatgggctcattagcctttgtaccgaatgtctactggctattgattatgcgcttctttacggggatcctttcgggttatattccaaatgcgacagcattgattgcttctcaagccccgaaagaaaagagtggctgggcactaggaacattagcaaccggagctatcgccggaaacttgatcgggccttctatgggtggtgctttagcacagtggtttggtatgaagaatgtatttatcatcacagggatcgttcttttgatcacattgctgctaacgatctttttggttcaagaagatttcgcacctgttgaaaaaggggaccttctatctgtcaaagaaatttttggacaaatcaaaaacctacaactattgattggcttatttattacttcattgatcctgcaacttggtgtaacaagtatcagtccaattttgactttatatatccgtgatctaagcggcaatacagggaaccttttatttgtcagcgggttgatcgtatcgattgccggtgtttcagctattatttcttcgccaatattaggtaaagtaggggaccgctacggaaatcataaagtgttattaggaggactactgctttcattcctttgctttattccaatgggctttgttacgtcaccattccaattgggcgttctacgctttcttttgggcttctctactggtgcgttaatgccatcgatcaatacgttaatcagtaaaatcactccaatggaaggtgttagtcgaatttatagttacaaccaaatgttttctaactttggacaagtgcttggtccaatggtcggttcaaccgttgcccatagttttggctacccagccgtgttttgggtaaccagtgcgtttgtctttttgaatatttgtctttctacatttaatttccgtaaaaattttcataagcacgatctcagttgaaaagaaaaaaaaaccagttacaatgaaggtaactggtttttcttctattaatgacttgtcttttttggcgaaggtgcaatcaaaccaagaaggataattagtacacctgctaccaaagagatgattgaggtcaattggaaatcataagtagctcccgctagtgagctgcctagatagccgacaacttggcctaagataaatgtccaaaataatgttgctaagtagcgcatgacgacacctcttttctgcgtatcttgcttttcgactttagtttatcacaaaaaatttcaatgtaaagattttcacattttcatttattcttttcaaattagaaataaagcagaaacaaacggaattatcattttcggagggattttctatgtatcatcaattgacaaccttaagcgcgtattccttacttcaaagtacgatcaaaattcctcgttatattgctgctgccaaaaaagctggttataaagttttggggctggcagatcacaatgtgttatatggagccttagaattttatcagcaatgccaaaatgccggaatcaaacctgtgattggtgtattattcgattgcacgtttggcacgtccactatgcgttttccattgtatctttttgcaaagaatctatcaggctaccgattattgatgcgcctttccagtgagaaaatgatcaacggtcacttggatctatctgaatacttaacgttaccagatctgtttggtattttgccgcaagggcaaggtttctctccagatcaatcggaagacttggcacagctttctcgagcattgacagactttgtcgctcgttttgatcaaaagagtcttttcctgggtgttcaaaaagcagcggcaacgccagaaagagagtggtttcaacagcacggtcttgagctgtgcgcttatcaacccgtagcagcactggaacaagcagaactatttgctgttcaagtcatggaacatattaagaacggtactcagatcgaagattttcgtaaagcgaaggaacaatcttccgaaacgtattatttagaacagcctgcggaactgattcaggcatttggagagaattcagaagcattggtaaataatcagcgaattgcagaagaatgtactctgacgattcctctccatcaacgtttgctcccgcatttccctttagaagaaggggaaaatgcggctgattttcttagaaaactgtgttttgaaaagttgtctgaacgtattacgcaggtcacagatatttaccgtcagcgtttggattatgaactatccgttattcatacaatgggatttgacgattactttttgatcatttgggatgtgatggattttgctcacaagaacgaaattgttaccggcgcagggcggggctcagcagcaggttcattagtagctttcgtattagccatcaccgatgtcgatccaattgaatatgacttgctgtttgagcgtttcttgaatcccgaacgctataccatgcccgatatcgatttagatatacctgataacagacgtgatgagattttgcgttatgtccgtcaaaaatatggtcaggagtacatggcgcaaattgctacttttggaacgatggcggccaaaatggtgctgcgggatgtttcacgagtgtttggtttgtcacaaagcgaagccaatcgctggtcaaaagccattcctaacgcattaaaaatgacattggctttagcttatgagcaatccaatcaattacgagaattggctaccttcaatgaacgaaatgaaacgatgtttgcagtggctaaggtactggaaggattgcctcgacatgtttccacccatgcagctggtgtggtgatcagcgacaagaatctcttggatctagtcccccttcaacaaggaagtgatgagatcctcttgactcagttcacaatgaatgatgtggaaacagtgggattgttaaaaatggattttttaggattacggaatctttcaatcattgacaatactttaagagggatcaagcgagttacaaatgaaacagttacccagaaagctattcctttaaatgacccagctgtgctgcgactatttcagcaaggcgatactgccggaatctttcagtttgagtcagcggggatcagaaatgttttgcgaaaacttggacctgaaagtatcgaagatatcgcagccgtcaatgcgttgtatcggccaggacctatgcaaaatatcgatacgtttattcgacggaaaaaaggacaagaaaaagtcgtttatccggatgctgctttagtgccgattttacaaaatacttatggaatcattgtttatcaagaacaaatcatgcaagttgcttctaaaatggcaggcttttctcttggtcaagcagatatcttgcggcgagccatcagcaaaaagaaaaaagacgtcctagatgaagaacggcgccattttgttgaaggagccgtagccaaccatttttccgcggagaaagcagaagaagtttacgattatattgagcgttttgccaattacgggttcaatcgttctcatgcgtttgcctactcatttatcggcttccaaatggcgtatttaaaggtacattatccagggccattttttgctgcattattgcactcggttaggaataatccaggtaaattaaaagaatatttgaatgaagcgactcggtatggtgtagcaatcttaccgccgtccatcaacaagagtggctatagtttctatcttcaatcggaaaaacagattcgttttggctttagcagtgttaaaggaatacgtagagacctgattcaagatattttagatgaacgaaaggagaatggaacattctcctccttagatcaattcctgttgcgcttgcatcaaaagaataacaaatggctgaaagaagattatatccgtccgttgttaagtattggtgcgtttgatgaattggtcactaatcggaagcaagcacttatccaattagaagggaaaatccaaaatatcacctatagtggcggcagtctcgatttgttagagacaatggctctcaaagaagccgaagtcgctgattatgacttagagcaaaagttagcgttggaagaagaatatctaggggtttatttatcagggcatcctgtccaacaatatcagaagctgcaacagttgaagcagacgatagcaatcgctgacttagttcccaacgaacgtgtccggatactattttatgtgcgtcaaattcgagaaatccgtacaaaaaaaggagagcaaatggcgtttcttgaaggaacagatgctagtaaagaagtctcaatcactgtttttcccacattgtatcgtcacatacgatctgacgttgcagaaaacgtcgtcttgtatgttgaaggaaaagtggaagtaagtcgttacaatggtgaaatacaactgattgctgataaaatagagctagctgaaaaagcgcaagcacagctaacagatcaaacgtgttatctgaagatcacacgtgatgttgagacgaaccatttgcaagaattgtcgcagttgctgagaaagcatcgaggccgggttcctgtggtgttgttctatgaaagcaacgggaaaaaagtgttgctgacggaagagaactggctaaaaaaagacgaagaaatggaaagaaagcttgggcacttgttgggagaggaaaatgttgttttcaagtaattttccgaaaacgttaaattttacttacacttttttcaactttttcccactatttcaagacatttctctggaataatggtaaaatactactcgtggttattacttgaaaagtatcaaataagggagttccaattccctaaacaaatctactaatgaggtgaatggataatgaaacgcattggaattctaaccagtggcggcgatgcgccggggatgaacgcagcggttcgggcagttgtaagaaaggctatctttgatgggctggaagtatatggaatcaattacggctatgctggtttggtagctggagatattcgccgtcttgatgtggcagatgtaggtgacaagatccaacgaggcggtacattcttgtactctgcgcgctatcctgaatttgcgacacaagaaggtcagttgaaagggattgaacaactgaaaaaattcggtattgaagggttggtcgttattggtggcgacggctcttatcatggtgcgatggctctaacacgccatggttttccggcgatcggtattccaggaacgattgacaatgatattcctgggacggactttactatcggttttgatacagcaatcaatacagtattggaatcaatcgaccgaattcgtgacactgcaacttctcacgtccggacattcgtaatcgaagtaatgggtcgtggtgcaggtgacattgcgctttggtcaggagttgccggtggggcagatgagatcatcatcccagaacatgactttgatatggccgttgttgcgaaccgaattcgtgaaggacgggaccgcggtaagaaacactgcttgatcgtcttagcagaaggcgtgatgggcggaaacgaatttgctgataaattatctgaatatggcgatttccacacgcgggtatcgattttaggacacgttgttcgtggcggatcaccaagcgcaagagaccgcgttctagcaagtaaatttggtgcttacgcagttgagttgcttcaacaaggcaaaggcggattgtgcatcggtatcgaaaacaaccagatggttgctgcagatatcatcgaaacgcttgaaaacaatcgtcacaaaccagatatttctttatacgacttgaacaaggaaatttccttttaagtttaggaagtatgaaacgcaacagtaattttgtaaaaaaagcttattaagctattttaaataaatgaataggagcgtttagtaatgaaaaaaacaaaaatcgtcagcacattaggaccagcaagtaatagtgtagaaattatttctgaactgatcgaagccggtgcaaatgtcttccgtttcaatttttctcatggagatcatgaagaacaattaggacgtatgacaatggtgcgtgaagcggtcaagaaaactggtaaagatgtagggattcttttagatactaaaggagcagaaatccgtacaaccgttcaagacacaactgaagcagattatggtcgtgccggctatatccaattcaacgttggtgaccaaacacgtatctcaatggacccagaacacaaaggaacaaaagaaaagattgcagtgacctatcctggattatttgacgatgtatatgtaggcggccatatcttatttgatgatggtttgatcgatatggagatcatcgaaaaagacgaagcagcacgtgaattagttgttgttgttaaaaatgcaggaatgttgggttctcgtaaaggggtcaatgcacctggcgtatcaatcagcttgcctggtattactgaaaaagatgctgacgatattcgttttggattagacaatgatatcgacttcatcgcagcttcattcgtacgtaaagctcaagacgttttagaaattcgtgaaattcttgaagaaaagaacatgactcatgtacaaatcttctctaaaatcgaatctcaagaaggtatcgacaacattgatgaaatcatcaaagtttctgacggtatcatggttgctcgtggagacatgggtgttgagattccagcagaagaagtaccaatggttcaaaaacgaatcatcaaaaaatgtaatgcggtaggtaaatcagttatcactgcaactcaaatgttagaatcaatgcaacaaaatcctcgtccaacacgcgcagaagcttctgacgttgccaatgcagtctttgacggaacagatgcaaccatgttatctggagaatcagcaaacggagactatcctgtacaagctgttgcaacgatggctcgtatcgatatcgaagcagaaaatgctttagcagaaatgagtactttccaaatcaaccaatttgataaaactgatgtaacagaaacaattggtctttctgtggcacgtgcagctaaaaatcttggcgtaaaaacaatcgttgctgcaactgaatctggctatactgcgaaaatgatttcaaaatatcgtccagatgcagatatcttggcagtaactttcgacgaacgtacaaaacgtggtttgatgttaaactggggtgtttatccaacagttgctgaaaaaccttcaacaactgacgaaatgttcgaattagcagctaaacaagctgtggatcttggttttgccaaagaaggcgatttgattttgatcactgctggtgtgccagttggagaacgtggaacaacgaacgtgatgaaaattcaaatgatcggttctaaattgcttgaagcacaaggaatcggtgaaaaatcaatcgtttctaatgccgttgtagccaacagtgcagaagaagcaattgctaaagcaaaagatggcatgatcttagttgttccaacaacagataaagaatatatgcctgcaatcgagaaagcagcagcacttgttgttgaagacggcggtttgacttctcatgcagcagttgtcggcattgcgaaagaccttccagtgatcgttggggcaaaagatgccacaacaacgatcaaagatggtgaattgattactgtggattctcgtcgtggaatcgtctaccgtggagaaacaacagctatctaatcttctttcgaaagattgattaatggaggcaacaggctcgtgcataagtagcgagtctgttgtttttttctctaaaagcaatcacttttttgtgcgtaaaattacagctgtagaaatgaaaaaggtgtcaagaaaatttcattgacaaagggaaataacccctgtataattgcttttgttgcttaggggtgataaaaatgaaatggtctttattggaattaaaaaaataccaagagacaccgctaatgttcgacgaaacgttgaacttaaaaaatcaattgataaaacgcgatggacagatcattgatttgtctcctgtgaaaatcactggcatgatgtctgttggaaaacatgaatatctcctacattatcgagtggagacaaccatcacgttaccttcaacacgctcattgactccagttgctttgccaatggattttacagtggatgaactcttcatgacaccagagcaatttcagcggcgagatgaaatgattccagaagaagatgtcttgatcattgaaggtcagacgatcagtttggatgattcagttgctgataacctattacttgcgattcccatgcaagtccttactgaggaagagaaaaatagcacagaaatgccgtcaggaaatgactgggctgttttatcagaagaagactatgcaaaccaaaaagaagcgcaagcccaacaaattgatcctcgtcttgcaaaattatcggaactgttcaatgattcagaagatgataacgcgtaggattggaataaattgcagcctcaaggttgctttcatttacaaggaggtgtagcaaaatggcagtaccagcaagaagaacttctaaagcgaaaaaagcaaaacgtcgtactcattacaaattgacaatcaacggtttgaacgaatgtgcaaactgtggtgaaatgaaaaaaagccaccatgtatgctcaaactgtggtcattacgatggaaaagatgtagcaacaaaagaagcataatccttttttacagaaaaagggatttcaaaatcctaaggctaaccatggagccttaggatttttctttttgtttcagattagtttcatgaaaactagaacttttctgaaataattcttactctttgaaagagaatagttcaaaacaactatcttttgcgctataataaaacagataactgaatcttaggaggatgagtgatgacaaaacaacaaatcggcgttgtcggtatggcagtcatgggaaaaaacttagcgttgaacattgaaagccgcggttattcagttgccctattcaaccgtacaggatctaaaacagaagaagtagtaaaagaacatccagataaaaactttaaagcaacctatacgattgaagagttcgtacaatcgatcgaaacaccacgacgcattcttttgatggtcaaagcgggttttgcgacagacgcaaccatccaagaattattgcctcatcttgaaaaaggggacatcttgatcgatggaggaaacacattcttcaaagatacgatccgtcgtaatgaagaattagcaaattctggtatcaactttatcggtaccggagtttctggtggagaagaaggcgcattgaaaggcccgtcaatcatgcctggcggacaaaaagaagcgtatgagttagtggctcctattttggaacaaatctcagcaaaagcagaagatggcactccttgtgttacctacattggaccaaatggtgcaggacactatgtaaaaatggttcacaatggtatcgagtatggagatatgcagctaattgctgaatcctatgatttgatgcaaaaaattctagggctatctgtttctgaaatggcggagatcttctctgaatggaataaaggggaattagatagctacttgatcgaaatcacagcagacatcttaacacgcaaagacgatttaggtactgggaaaccaatcgttgatgtgattttagatgctgccggcaacaaaggaacggggaaatggacgagtcaaagtgcattagatcttggtgttccactgccgttgatcacagagtctgtttttgcgcgttatatttctgcttataaagaagaacgagtgaatgctagccaagtcttaccaaaacctgaaggattcgaatttacaggagacaaacaagaatttgttgagaaaattcgggaagcattgtatttcagcaaaatcatgagctatgcacaaggttttgcgcaattacggaccgcatcaaaagagtatgattggcaactgccatttggtgaaattgctaaaatctggcgtgcaggttgtatcattcgtgcgcaattcttgcaaaaaatcaccgatgcttatgaaaaagatacggatatcgaaaacttattgcttgatgactatttcaaggaaatcacaaaacgctatcaacaatccgttcgtgacgtcgtagcattggcagtccaagctggcgtaccagtcccaacattctcttcagctattgcttattttgattcttatcgctcagatcgtttgcctgcaaacttgatccaagcacagcgggattatttcggtgcccatacgtatgaacgtacggacaaagaaggaatttaccactactcttggtatgaggaagaataagtcgaacaattgagaacaaattaagagaatgaccgaacagtgagaactttcggtcaatctcttttttattttttagatacatgataaaataaagcagatagtgtctaactatatgcagaataaccgataaaggagctctaactaatgagtaatattctaatcattgaagatgaaaagaacttagctcgattcgtggaattagaattaaagcatgaaggctataataccgaagtacattataatggcagaactggattggatgcagcgttgaacaatgaatgggatgccatcttacttgatttgatgctaccagaactaaacggattagaagtttgccgtcgtgtgcgccagaccaaaaatacgccaatcattatgatgacagcaagagattcagtgatcgatcgggtctcagggctagatcacggagcagacgattatattgtgaaaccctttgcgattgaagagctactagctcgtttgcgtgcgctgttacgtcgaatcgacattgaaggagacaaaaatgttgccaagcaaacgacgatcacttatcgtgatttaaccatcgagaaagaaaaccgtgtggtgcgtcgaggcagtgatgtcattgaattgacgaagcgtgagtacgagttgcttcttactttgatggagaacgtcaatgtcgtcttagcccgtgatgttctgctgaacaaagtttggggttatgaaacagaagtagaaacaaacgtagtcgatgtgtatattcgttatctacggaataagatcgacgtacctggagaagaaagctatatccaaactgttcgggggacaggatacgtgatgcgttcgtgagcttaaaaaaaagaatgaaaaaactaaaagaactgaaggggccttctttgactgtgaagtgggccttcgcaagttctttctttatatttgttgtttttacaatttttgcagtcatcacttacaaaacgtctatcaacctgcttgtggctaaagaagaaaataacgtggagcgtacgatgtcggaagtagcttctaggttagccaattcagaccaagaattgacattggtgcgtacctatcgcaatttaactaagaacgatagtggtgatacgagcatctacgaccgaacttcaacaattgatgggaacttaatgaagatcgactcgtttatttccgagttaggtcagtctcctttgagcttatttgtttataatctgaatcaggaattgattttcaaaacccatgaaaataatctttctctgatcgatgtgcagcgaaagccgcccacgatcgtgacattggacaatattacaggctttttgtcgatccagccaatctactcaaaagaaacgagagaaaaaattggttatgctcaaacattttatgaactgacctcattttatgaaattcgcagtaagctcttgttaacgctaatcatacttgaagtcgtttccttgattctcagtagcgttttaggttttttcttatctgcttatttcttgcagccactgaaagttttgcgggatacaatggaaaccgttcgaaagaatccccaatcgaccgtgcatatgcctgaactgaatacaaatgatgaattatctgatttggcagacatctttaatgagatgctcgaccgtatgcggctatatatcgagcagcaagaacggtttgtagaggacgtttctcatgaattacggacaccagtggcaatcattgaaggacatatgagcctgttgcagcgctggggcaaggacgatccagaagtattagatgaatcgcttgcagccagcatgcaagaaatcagtcgaatgaagacacttgtgcaggaaatgctcgacctttccagagctgagcaagtagatgtccactatgcgaatgaaacgacaaaagctaaagaagtcgtataccaagtatttaataattttaaaattctttacccggaatttgttttcacattggatgatgatctttaccacgaattgactttaaaaatttatcggaatcatttcgaacaaattattattatcatcttagataatgccgtcaagtactccacagatcgcaaagaggtccatttatctatttcttctgatcgacaaacgtttgagattgcaattcaggattttggtgaaggaatcagcaaagatgacttggataaaattttcaatcgattttatcgagtggataaggcgagagcaagaaccaaagggggaaatgggttaggactatccattgctaagcaattattggaaagttataaagggcgcattactgcagaaagtgtgattgggcaaggaacgatttttagaatatatattcctgtggttcaatctagtaaggatgttttgaaatagcgcagatcctctgcgaagaaaccagctggttgttgtaggttagcgacaatcagctggttttttctttataagggatcttacttaatggacagcgtttctgcttgttcatataaacaggaacgattgaggaacacgaatagttataaaacgcaattattgctataaaagcgaacgatgagataaagaatagaagaaagattcggctaaaaaaaatgttgagaaaaagctttgttttttgttgatttttcgcagtagaattgctatattagtatttgtctttgtgatagtcactgtttaaatctttcaaatattttttcaaaataaatgttgacgaagatcaagacaaatgttattataacaaagtcgtcagaaagcattaggtaaaaaaacttaaaaagttagaaaaaactttcaaaaaagttgttgacacaaagctttcgagatgataagatataaaagtcgctgagagataaagagtgattaaataacaatcacttgaaaaagcttttaaaaaaagagttgacattcacttgttgatctgatatgatttaaaagttgctaacgcagcgcagtagacctttgaaaactgaacaaagcaagcaaacgaaccaatgtgtagggcgcttcattatatgaagcaaaatacatgcaagcgatagctagcaaagttaattttatttgagcttaacgatcctatggatcgttcaaacaaatcattatgagagtttgatcctggctcaggacgaacgctggcggcgtgcctaatacatgcaagtcgaacgctttttctttcaccggagcttgctccaccgaaagaaaaagagtggcgaacgggtgagtaacacgtgggtaacctgcccatcagaaggggataacacttggaaacaggtgctaataccgtataacactattttccgcatggaagaaagttgaaaggcgcttttgcgtcactgatggatggacccgcggtgcattagctagttggtgaggtaacggctcaccaaggccacgatgcatagccgacctgagagggtgatcggccacactgggactgagacacggcccagactcctacgggaggcagcagtagggaatcttcggcaatggacgaaagtctgaccgagcaacgccgcgtgagtgaagaaggttttcggatcgtaaaactctgttgttagagaagaacaaggatgagagtagaacgttcatcccttgacggtatctaaccagaaagccacggctaactacgtgccagcagccgcggtaatacgtaggtggcaagcgttgtccggatttattgggcgtaaagcgagcgcaggcggtttcttaagtctgatgtgaaagcccccggctcaaccggggagggtcattggaaactgggagacttgagtgcagaagaggagagtggaattccatgtgtagcggtgaaatgcgtagatatatggaggaacaccagtggcgaaggcggctctctggtctgtaactgacgctgaggctcgaaagcgtggggagcgaacaggattagataccctggtagtccacgccgtaaacgatgagtgctaagtgttggagggtttccgcccttcagtgctgcagcaaacgcattaagcactccgcctggggagtacgaccgcaaggttgaaactcaaaggaattgacgggggcccgcacaagcggtggagcatgtggtttaattcgaagcaacgcgaagaaccttaccaggtcttgacatcctttgaccactctagagatagagcttccccttcgggggcaaagtgacaggtggtgcatggttgtcgtcagctcgtgtcgtgagatgttgggttaagtcccgcaacgagcgcaacccttattgttagttgccatcatttagttgggcactctagcgagactgccggtgacaaaccggaggaaggtggggatgacgtcaaatcatcatgccccttatgacctgggctacacacgtgctacaatgggaagtacaacgagttgcgaagtcgcgaggctaagctaatctcttaaagcttctctcagttcggattgtaggctgcaactcgcctacatgaagccggaatcgctagtaatcgcggatcagcacgccgcggtgaatacgttcccgggccttgtacacaccgcccgtcacaccacgagagtttgtaacacccgaagtcggtgaggtaacctttttggagccagccgcctaaggtgggatagatgattggggtgaagtcgtaacaaggtagccgtatcggaaggtgcggctggatcacctcctttctaaggaataatacggaagactacacatcgtttgcctttgttcagttttgagaggtctactctcaaagataaatacccggggccttagctcagctgggagagcgcctgctttgcacgcaggaggtcagcggttcgatcccgctaggctccattaacgacagaggtcgttaagtttgttcattgaaaactggatatcgaagaaaatcaaaacaagtaacacacaccgagttgacaagttaaagagttttttaataagttcaacgcttattttcttgagcaaccttctatcgctagaagaagtactcaccgaccgtaaggtcaaaggttaagtgaataagggcgcacggtggatgccttggcactaggagccgatgaaggacgggactaacaccgatatgctttggggagctgtaagtaagctatgatccagagatttccgaatgggggaacccagcatcttttataggatgttacacagttgtgaatacatagcagctgtgaggtagacgcagagaactgaaacatctaagtacctgcaggaagagaaagaaaattcgattccctgagtagcggcgagcgaaacgggaaaagcccaaaccaacaagcttgcttgttggggttgtaggactccgatatggtagttgaaacagatagtcgaaatacttggaaaagtatgtcaaagagggtaaaaaccccgtagatgaaatctggctcacacctaggaggatcctgagtacggcggaacacgaggaattccgtcggaatccgggaggaccatctcccaaggctaaatactccctagtgaccgatagtgaaccagtaccgtgagggaaaggtgaaaagcaccccggaaggggagtgaaatagatcctgaaaccgtgtgcctacaacaagttagagcccgttaatgggtgatagcgtgccttttgtagaatgaaccggcgagttacgatagcatgcgaggttaagttgaagagacggagccgcagcgaaagcgagtctgaatagggcgaatgagtatgttgtcgtagacccgaaaccatgtgatctacccatgtccaggttgaaggtgcggtaaaacgcactggaggaccgaacccacgtacgttgaaaagtgcggggatgaggtgtgggtagcggagaaattccaaacgaacttggagatagctggttctctccgaaatagctttagggctagcctcggaattgagaatgatggaggtagagcactgtttggactaggggcccatctcgggttaccgaattcagataaactccgaatgccattcattcatatccgggagtcagactgtgagtgataagatccatagtcgaaagggaaacagcccagaccaccagctaaggtccccaaataactattaagtggaaaaggatgtggggttgcacagacaactaggatgttggcttagaagcagccaccatttaaagagtgcgtaatagctcactagtcgagtgaccctgcgccgaaaatgtaccggggctaaatagtttaccgaagctgtggagtgcaccgtaaggtgcattggtaggagagcgttctaagggcgttgaaggtagatcgtgaggactactggagcgcttagaagtgagaatgccggtatgagtagcgaaagacaggtgagaatcctgtccaccgtatgactaaggtttcctggggaaggctcgtccgcccagggttagtcgggacctaagccgaggccgacaggcgtaggcgatggacaacaggttgatattcctgtacccgttgtttttgtttgagcaatggagggacgcaggaggctaagaagtgcagactgatggatatgtctgttcaagcagtgagtcttagtgggagtcaaatgcttctacttttaaggacaagctgtgatgaggagggaaataatagtaccgaagcttctgatgtcacactgccaagaaaagcttctagtgagaaaacaatggcccgtaccgcaaaccgacacaggtagtcgaggagagcatcctaaggtgagcgagagaactctcgttaaggaactcggcaaaatgaccccgtaacttcgggagaaggggtgctgctctaacgagcagccgcagtgaataggcccaagcgactgtttatcaaaaacacaggtctctgcaaaatcgaaagatgacgtataggggctgacgcctgcccggtgctggaaggttaagaggagtgcttagcgtaagcgaaggtacgaattgaagccccagtaaacggcggccgtaactataacggtcctaaggtagcgaaattccttgtcgggtaagttccgacccgcacgaaaggcgtaacgatttgggcactgtctcaacgagagactcggtgaaattttagtacctgtgaagatgcaggttacccgcgacaggacggaaagaccccatggagctttactgtagtttgatattgagtgtctgtaccgcatgtacaggataggtaggagccgtagagatcgggacgccagtttcgatggaggcaatggtgggatactacccttgcgttatggccactctaacccgcagcccttatcgggctgggagacagtgtcagatgggcagtttgactggggcggtcgcctcctaaaaggtaacggaggcgcccaaaggttccctcagaatggttggaaatcattcgaagagtgtaaaggcagaagggagcttgactgcgagagctacaactcgagcagggacgaaagtcgggcttagtgatccggtggttccgcatggaagggccatcgctcaacggataaaagctaccctggggataacaggcttatctcccccaagagtccacatcgacggggaggtttggcacctcgatgtcggctcgtcgcatcctggggctgtagtcggtcccaagggttgggctgttcgcccattaaagcggcacgcgagctgggttcagaacgtcgtgagacagttcggtccctatccgtcgcgggcgttggaaatttgagaggagctgtccttagtacgagaggaccgggatggacttaccgctggtgtaccagttgtctcgccagaggcatcgctgggtagctatgtagggaagggataaacgctgaaagcatctaagtgtgaagcccacctcaagatgagatttcccatttctttaagaaagtaagatccctgagagatgatcaggtagataggtcagaagtggaaggccagtgatggttggagcggactgatactaatcgatcgaggacttaaccacgattgaaaaaagcaaggaaactcggaagagttttgattcttcgatccagttttgagtgagcaatacttactcaattgaatagtgtggtggcgatagcgagaaggatacacctgtaaccatgccgaacacagaagttaagcttcttagcgccgattgtagtgaagggtttccctttgtgagagtaggacgtcgccacgctgtttcattccggcatagctcagttggtagtagcgcatgactgttaatcatgatgtcgtaggttcgagtcctactgccggagttctcttacaagagaaaaaagggtattgagcttcttttaggctggagagttgtccgagaggccgaaggagcatgattggaaatcatgtagatggctaccgctgtctcaagggttcgaatcccttactctccgttataatcttggtccgttggtcaagtggttaagacaccgccctttcacggcggtaacacgggttcgaatcccgtacggatcattacaatttaatgaacacccggaggtttagctcagctgggagagcatctgccttacaagcagagggtcagcggttcgatcccgttaacctccattacggtttggtagttcagttggttagaatgcctgcctgtcacgcaggaggtcgcgggttcgagtcccgtccagaccgtttcattattattgtaaatacaccatgttattttggctcggtagctcagttggtagagcaatggattgaagctccatgtgtcggcagttcgattctgtcccgcgccaccatggaggagtagcgaagtggctaaacgcgacggactgtaaatccgttccttcgggttcagtggttcgaatccactctcctccattttataggggcatagtttaaaggtagaacagcggtctccaaaaccgttagtgtgggttcaattcctgctgcccctgccattattattttaaaaagttttcttatcacggcgggtgtggcgaagtggttaacgcaccggattgtggctccggcattcgtgggttcgattcccatcactcgccctttcatttttggggtatagccaagcggtaaggcaacggactttgactccgtcatgcgttggttcgaatccagctaccccagttcgatttacatttttgtaaattgcagaaatagtataatggcggtatagccaagtggtaaggcagaggtctgcaaaaccttcatcaccggttcaaatccggttaccgccttagtacgatactaatatttgcgttatgccgacgtggcggaattggcagacgcgctggactcaaaatccagtgcccgcgagggcgtgccggttcgaccccggccgtcggtattatcggtacatcattcgttcgtacgattgatgtatcgatttttatcctaatattggttgaagatcaactggttggataaaaaaagctgttaaaatttagtaagtacttgagtgatctgcaatcatgccgacgtggcggaattggcagacgcgccagactcaaaatctggtgtccgcaaggacgtgccggttcgaccccggccgtcggtataacaatgaagcatcaacgtaaggaatacgttgatgctttttttatttaaatgtgtgctttcttaaattttgaaaggattgatctttatcagcaaaaagaaaaagtgttgcgaattactgttttagaaaatttactagaatgcgtatttattttcactagctgagaatgaatgaaaaaagttgcattagttaccggtgctggtcaaggtattggctttgccatagctaagcgtttgtacaaagatggctttgacgtggcaatggtggattacaatgaaaactctgtaagagcggcagcgaaagagcttggtgaacatgcgattgctatcaaagcagatgtttcgaaacgggatgagattttttcagcagttgataaagtaatagatgtctatggtgacttatcagtgattgtaaataatgctggggtagcaccgactacaccgatagagtctattactccagaacagtttgaaaaagtttattccgtgaatgccgggggcgtattatggggaacacaagcggcttctgaagcatttcaaaagttgaatcatggtggaaaaatcatcaatgcttgttcacaggcaggtgttgtgggtaatcctaatctcatgttgtacagtagctcaaagttcgctgttcgtggtatgacccaaatcgctgcgcgagatttagctgactatggtattactgtaaatgcttatgcaccaggtattgttaaaacaccgatgatgatggatattgcgcatcaagtaggtgctaatgctggtaaagatgatgaatgggggatgcaaacttttagtaaagatatcgcattgaaacgtttatctgaacccgaagatgtttcggcagttgtttcatttttagccagtgatgatgccaactatataactggacaaacaatcattgtggatggcggaatgcagttccagtaatcaataagttgttgatctaggattgggcgttcggatagtcccgcaggttttcagttgattgaaactcaccaaaatagtggcattttcttgttcaattgttactgtaagaaaaactaaatgatagtagttatgtaatttgctgtttcatgcaaatcatcgaatgaatgacccgattagatagattctaatcgggtcattcatctgtatacgaaggaacgatcgaaaaagtctgagaatggagttatcacaaagaatagaacaaaagataaagcaattctttagcccttggcaaatttgatgatttcaacttccatgggggcgagggtgagttcacaaacttttctttttgataataatgctgtaccttccgatagaaattgtacttgttgtgaatcgtttgtatgattaagtaggaataagaagatatgggttggtccttgtcgaacagtgacagacaactcgctgttttcttgcaaatacctctcagcaactttttttagttttgcatcactaaaaatgtcgttcaataagtcggtcaacccttcttggtctaactcggttcctaaataataagccagtcctttgccaaaccgatgtttagtgatagctggtgaatctttaaggaaatcactcgtgaaggtagccagtggggtagcaccttgtaagtggatcacttcttcccactgacgattttcataaaatttatttttaaaatgcacttgttgctggatttccggttttaaaggctgaaattcttcaactatgatccctaatacctctttaaaaagtcctggatagccgccaagatagacttgatcgttttcgttgacgattccgctgaagaaatttgtcaagaatgttccaccatttgctacaaattctttgactttattgccgaattcttctgatgcagagtacaaattatacgcaatcacaaggggatagccgtctagtgattcagatggatgaatgaaatcaacagcaatgttcaacgctcttagagcggcatataacgccctcatttggtgaatatagcgaatattggtattcggcttcgcatctagctcaagggcccaccaattttcccaatcaaatacgatagcaatatcggcaacaaaccggctgccaacgatgtcattcaactgttttaattcatttcccagagcagcacattctcgaaaggtgcgacttgtgtgtggatcaccatgagggactattgcactatggaatttctctgcccctccttgtgattggcgccattgaaagaacatcatgccatcggagccatgagcaagtgcctcataactccataagcgcatttgaccgggttttttgacgccgtttacttggcgccagttgaccgcacttggggcttgttccatgataaaaaaaggtttcttttttaaacttcgcatgagatcattggctaagaattggggatagggcagagattcaaacggattaggataggcattccagctaacgacatccatttcagaagcccatttgaagccatcgacatatttatgaagacccatcaaattcgtcatgaatgggatgtttgacgagaatgtttgaattgcctttttctcgatctgataaatttccagattcatatcagaaatgaagcgacgataatcaagctgttgacaaggattcttaaaagtcggcatttcttctggtaggaaaatctcatcccattcttgataggtttggctccaaaattttgttgaccaagccgtattcaatgcttcaattgtttggtattttttttctagccaattttggaaactggcacgacagtttgggcaataacattcatggatgtgacaagtatattcattattgatatgccacatcacaactcccggatgttggctgtatcgtttggcaacagcttcactgagccgacgggcatattcccgataaatcggtgaagtcgggcaatagtgctggcgagaaccatgtaccaaccgattgccatgaatggtcatcggcatcatttcaggatattttttgactaaccatgcagggggcgaagctgttccattggctaaatcgatagcaatattgttttcataaaggagatccatcagccaatccaaaaaagtgaaatcaaatgttgattcatttggttgaatgtttacccaaccaaaaatattgatgctgacataattgactccaacttctctcattaagcgcatgtcttcctttatcgtttcttgtgaccactgttcaggattgtaatctgcgccgtaataaatttgtttttgatcaaccatctgttaaacttcctttctcgtagtaagacatatttgtttcaatcataacaaaaaaagtaaaagctgaaagcgttggcaaaaaggtgcatgaaataatacaaatatctgtaaaatgttcaaaccgatctcaatacacgagaaccatattacttgctgtttttttattttcaacctacaattaaatataattgataacactcaattcttaatgaagctgtattattattagatgttcttttatatttatgcacatcttcagcattttgaaatgagcgaaaggaatggttggatatgtcaaaacctatacaaatattttcagaaattgaaccgttaaaacgggtgatgctccatcgtcctggtgcagaacttgaaaacttgatgccggattatttagaagacttgttgtttgacgatattccatttttggcacaagcccaacaagaacatgatttttttgcaaaagttttagtggagaatggctgtgaagtggtttatttagaagacctggctgctgaaacattacagctttcaggatgtaaggaagctttcttggatgattatttgcaagagacgaaaattcaagatcaagatgtattaaatgaagtcagagactattttctttcgattaaagacgaacgagcgtttattgatcaaacgatggcggggttaaaaaaacaggatctttccatatcgaagactgcaagtttctcagcaatgcgggaaaatgattatccatttattattgatccgatgccaaacctttattttacaagagatccgtttgctattataggacatagcatttctcttaaccggatgttttccgaaactcgtcgaagagaaacgctttatggacagtacattttcaagcaccatccgcagttcgccaagccatcggtcaatttcttgtatgatcgagaagaacctgcacgtatcgaaggtggggatcagcttgttttgtcccagcatgtattagcgatcggtatttctcagcgtacagaagtgcactctatcgaaaaaattgctgaaaacattttttcaatggaaccgtcatttgaacatattttagcatttgatattggttctgaacggaaatttatgcatctggacacagtctttaccatgattgataaagacaagtttacgattcaccctgaaatagaaggtgaactaaccttgttctctattacaaagcaaggacaagaaatcaaagtagttgaagaaaaagatacgttagatcacattttatgccgttatttggacttgccggcagtcgagttgattcgttgtggcggcgacgatatcacggcagctgccagagagcaatggaacgatggatcaaacacattagccatcgcgcctggcgaagtgatcgtctatgaccggaatactattacgaaccaacttttagcagaggccggtattaaattacatcaaattccaggtagtgaattagtaaggggccgtggcggtccccgctgcatgagcatgccgtttattcgtacagctgattgatagaatgactagctgatttaagtgtttttttatcagcaaaaaacaggtggcatcacaaattaggacgtttaaaaaagatgagaggaagtcatttttctttcatcttttttttatttgattaaaaaacctccattataatgaaagggattacttttcgtgaaattgtgcaaaaaatttaaattttatatgtaatgattgtaaaaaaacagatgaaaccttgttatactacaaaatatatgttacggttatattagtgacgcgggtaagtgtgagtagatgacacttattaaattttaacaccatacgaacagcgatcgcttgattcgtaatggttttttttcgcgaaaaaaagtagaaagtaggtgagagaatgtctgtagatgccattcgtttgctgcaagaagcagaagactttgcagaacaaaaaaacacgaaagcggaagctaaaaaaaaacaactgatccatgaaagtcaaacaagaatttcagcattccagaaagaattggtacaaaaagaacgtgaagcacaacgaatgattgaagaaaaagttgcaacggaatttgagcaatcaaaacaaccccttgtgacaaaaacaaaagaggaagttgagacattgcgcacgatttcagctgagttgagagaacaagcattggcaataataataaataaggttgtgacatagatggcgattgcaaaaatgcaaaaattcagcctgttaaccttttacgaacaaaaagatgccgttttacagcagttacaagactttcaaggtgtcgaattgctttcttctgaaatgtattacgagtcagaggaaaccacaggcgtgttaacacccgttcgtgatgaacagaaacagactgaagaagtagaaaaccaatttgatcaagtaaattggggcctgcaattattagaggaatatgttccaaaaaaaggaatgctggaaaaacttcggcaaccaatcaagcgctacacacttcacgaattagcgcaagccgctcatacttatccttggcaagaagtttgtcaaacacttcgaaaacaagacaaacgtttacgattgatcgaacaagaaaaacgagagcttttggctcaagaagcagaactgaatagatggaaatactttgaagaccgtcctcagattttgaatgaattaaaaaaatcaggtggcctattaggttcgctcccaaattcagaatttgcggctttcacaaagggttgcgaaaaactgccactcgtttattttgaaacagtttatcaatcacaaacgactacatacttattcgttcttttccataaagatgttaaagataaagtaagttcccttttaaaaaagactgcattcgagcagtatacctatccctattcaggtctgccaaaagatgacctgcaacatgtaaaagaaaaatcccacgcattgattgaggaagaaaaatcaatcaaacactccttacgtgcaatgagcgaagagcagggacaattgcgtctcgtagcagagtatttagatggcgcgatcaaacgagctcagagtaatgaaaagttgcttcgttcggctcatgccgtagctatttcaggctggatccctgttgagcaagcagcagaactggagaaaaggatccaacaggccagcaaagatgctttttatcttgaataccaacaagtgaaagaacaagaaatcgaggatgttccgattttgttgaataattcgcggtggatacaaccctttgaagggttagtgcggatgtatagtttgccccagtatgatgaattagatcctacaccgtttatggcgccattttatatggttgcatttggaatgatggttgcagattttggctatggattattactgtttttggcaacattcttgggcaaaaaattctttcatttaagtaaaggattggaacaaaatttgacgctgtttcagctttgttcgattcccacgattatttggggcttgatttatggtaatttctttggctttgaattgtcattccaattgttatcagcccaagaagatgtcaatcagattttggtcttgtcgatcattttcggatatatccaaatcatgtttggattagctttgaagttttatgtcctttggaaacgaaaagatcagaagctacaggctgtttttcaggctggatcttggatggtctttttgatcagtgttgttctattggcagcaggaatgttgctgttgcctgattcgcctttacaaaccattggttttatcatgattatcgctagcttaggggcagttgtatttggcggtagtttagaaggcaaaacactagctggtaaaatcggctcaggactatatggattaatggatgttacgaattacgtaggggatatgatcagcttcacacgactcatggcattaggagtcgcaggaggcagtatcgcatccgcattcaatttgatcatcagttatttaccaatagctgcgcgtttcacagtcggtattttgctttttgtggcgctgcatgcattaaatatctttttaagctatttaagtgcgtatgttcatggtattcgtttacagtatttagaatatttcggaaaatttttcaccggtgggggacgagcatttgtacctttcaaaaccgatgaaaaatacgtagaagttatctcagaagagaaaatgcaggaggaaaagaatggaaaattggattagtttcttttatgaaaatggtgggttggtttttgccgcattaggtgtagctacagcgacaatttgtggtgggatcggttcaacgatcggggtcggtatgaccagtgaagccgctgcaggattgactgcagagcaaccagaaaaatttggacaggccttgatcttggaactgttgtcaagtacccaaggactatacggtttcgttatatcattcatgatttttggtcaaatgagcggaacgatctcccttgatagaggaatgtacctatttatcgcttctttacctattgcgttgacagcaatcgttgccggaagatggcaaggacgtgctgcaagtgccgctatgcagattttagccaagaaaccggagcacgtaacaaaagggatcatttatgtagcgatgatggaaacgtattgtatcttaggtttcgttatttccttcttgctagttttaaattaagagggggagaaagatgtctgatattacgcgattaaccgaaaaaatcacagcagatgctgaaaagaagtatcagttggtccttaatgatgcacaagtagaaattgaaaaacaggagcgtctcaaacgttctcaactagaagaacaactttctgatcgtttggcccaatttgaaaaagaaaaacgggcagaaatgtatttgcagatttccgatattcacattcagtctcgcaataaagtgcttgccgcgaagcaatccgttttggaagaattgtttagtgaggcacttgagcgcttgaaccaaatggaagccgctgattttcaagcattcgtcacaaaaggagtacaagaagcacaggtttttggtgaagttgaattggtattgggagaaaaaagtgcgcatctgctgacagaaggttcattgaaagagattcaacaaacgattcctgaatgtcgactaacagttgcaaaacaagttttgccgcgaaaaggcggatttttactgcgccgaggcgatattgagctgaactttacgtttgatgcgttgttggatgccagcaaagaagagttgagtcatacattactgcaattgatttttgaacagtaagcgggtgtaaaaatggaagatatcaaatacaacacgctgaatacacgaatacgaacctatgaagcggaattgatcagtcgcagccgttacgaacgtatgctttctgccaacagtgccgaagaagtttatgctcttttgcgagaaaccgtttatggtgattttatcaatgaagaagatcgagtccatgattttgaacaagtattgaccgcagaattaaaacgagtatatgaaaacttgtatcagctaacacctgatcgttctgtggtggattattttgcccttcgctatgattatcaaaatctgaaggtgttagtaaaagctaaattcatgaaacaagacttttctgaatttttggtaccgatcggaaccatgcctttaaatgaattgaaagatttggtcaacacaagaaaaagtgcgcacgcagagcagccaatgattgcttgtatcgatgaagtattttcctatatcgaaaattatcatgagattcaatccgtagatatcatttttgacaatcatttttgggaacatctttggtcaattggtaagcgatatgatgatccgtttttacaaggaatcattcaacggcaagtagatatttttaatatttcgacagcactacgtagttacgccatgaagcgtcatcgaggctttatcagcgctgttctagcagataatgggactctccctgcaaaagagctgttggaagcaatcacgacgtctttggaagcttttgtccagtatctgcaaaatacaccttacaaacatttgatcaatcacagctatgaagaactgcttgagaagaagacccttaatacgtttgatctgcgaaaagataactttttgatgggaaaattgaaagaacaaaaaatcgtgccattcggtccagctgcgatgatcggttacttgtatgcaaaagaaatcgaaagtaaaaatttacggattattttgattggaaaaatcaataaagtgccggaagagatattaagaagtcgggtgcgtgatacgtatgaataaaaaaatagcaatgatgggtggcaaaaactcaattttgcccttcaaaggtctaggaatcgatatctatcctgtagatgatcttgaagaagccgcacaacagctgcaggaaatggcagaagactatggggtgatcttcttgaccgagcgattgattgaacagttggagtcaatcattcgacaatacgaagaactacccacgccagccatcatccccatccccagcagtacagggagtctagggatcggaatggcacggatccagcagaatgtcgagaaagctgttggaatgaatatattagattcttaaaagagaagtacggcaactaggaggaatgcatgtggcatttggcacaatagaaaaagtatctggtcccttggtcacggcctcaggtttatcaggagctaagatccatgaaatctgtaaagtcagtgaaaaaggcttgattggagaaatcatcgagatcaagaaaggtctcgtgtcgatccaagtatatgaagaaacagcaggaattggaccgggcgaacccgttgaatcaacaggggctccgttatcggttgaattagcccctggcttgttgacagaaatgtttgatggtattcaacgtccattagatacctttatgaatcaaacagagagtgattttttggaacggggtgtgaccattgacccgctaaatcgtcaaaaaaaatggacgttcatgccgcaagtaaaagtaagggacaacgtacaagctggagacattctaggacttgttcaagaaacaacagccattgaacacaaagtgatggttccgccaggtgtgaaaggcactgtaaaggaaatcatggtaggtaattatgctattactgaaccgatttgtcttttagaaacggcagaaggcgaacaacgcttgactatgatgcaaaaatggcctgtccgtaagcctagaccgactgcagcaaagttaaatccgggtgaaccattagtcactggtcaacgggtgatcgataccttctttccggtagctaaaggtggatcggcagctgtgccgggaccttttggtgcaggaaaaaccgttgttcagcatcaaatcgcgaaatggtcggatgtcgacatcgttgtgtatgttggttgtggcgaacgcggcaatgaaatgaaagatgttatcaatgaatttccagaattgatcgatcctcacacgggtgaatcgatcatggaacgaaccgttttgattgccaatacttcaaatatgccagttgcagctcgtgaagcttcgatctatacaggaatcactattgctgaatattatcgggatatgggatacagtgtagcgatcatggcagattcgacttcacgatgggccgaagcattacgagaaatgagcggtcgtttacaagaaattcctggagatgaaggatatccagcctatttaggcagccggatcgcggaatactatgagcgtgctggtcggttccgttcgttgggatcggagcctcgagagggcagtattacagctattggtgctgtttcgccagctggaggggatatctcagaaccagttactcaaaacacgttgcggatcgtgaaagttttctgggcattagacagtatgttggcacaaaagcggcattttccttctattaattggctgaactcctattctttgtatgaagatcaaatcaattcttatttagatcagttgatgggacctcgctggtcggagatggtcaatgaagcaatggcgatcttgcaagaagaaagccgcttagaagagatcgttcagctagtgggaatggattctctctcacagaaagatcgtttgacgatgatgacggctcgttctttacgtcaagattatctgcagcagaatgcttttgatgacgtggacacctatacgtcaagaaataagcaatttaaaatgctagaaaatattttatattttgatgaacaagcaaaacgggccttgcagctaggggcgtatctggatgacataaccaaaggtaccatcgatctgcgagaacggattgcccgcagtaaatatattcctgaagaagaactgacacgtttagatgcaatcaaacaggacacgaaagcattattacaaaaaatcgtagagactggaggaattcattaatgctaaaagaatatcgaacagtctcggaaatcgctggtcctttgatggtggtagaaaatgtcaaaagcgtcaaatttgacgaacttgtccaagtgcgaatggacagtggcgaggttcgtcaagggcaggttttagaagtcagcgatgattatgccgttgtacagatttttgaaggcactagtaacctgagtgcagaagagagtaaagcccgctttttaggaacgggtttaacgcttggtgtatcgccagatatgatggggcgtgtctttgatggactaggtaagcctaaagatgatggaccgcagatcattccagaaaaacgaattgacgtcaatggtgaagccatcaatccaatggccagagattttccagatgagttcattcaaacggggatctcaacgatcgatcacttgaatacgttggtccgtggtcaaaaactgccgatcttttctgcgtcaggattgcctcataaggaaattgcagcacagatcgcccgtcaagcgactgtgccaagtcaagaaggtaactttgccatcgtttttgcggcgatcggcattcctttcgaagaagctgaattctttgtagaagagtttcgcaaaaccggtgcattggatcgctcggtattgttcatgaacttagccaatgatccagccattgagcggattgctacaccgaaaatggcattaacagcagccgagtacttagcttttgaaaaaggaatgcatgtattagttatcatgaccgacatgacaaactattgtgaagcgctgcgggaaatttcagctgctcgccgagaagttcctggcagacgcggttaccctggttatttgtacaccaacttagcgactctttatgaacgggcaggacgtttgatggataaagaaggatccgtcactcaaattccgatcttgacgatgccggatggagataagacccacccaatacccgatctaaccggctatatcacggagggacagattatcctttcccgtgatctttacaagagaaacatcaatccgccagtggatattctacctagtttgtcccgactgaaagataaaggaaccggagaaggcaagactcggcgggatcatgcggcgacgatgaaccaaatctacgcggcatattctgatgggaaggctgccaaagaactgtcgatcgtattaggggaatccgcactttcagatattgataagaaatttgctcgttttgcggatctttttgaaaaagaatacgtaaatcagggatttgataccaaccgaacgattgaagaaacattggacattggctggaaattgctcgctacattaccgaagcaagaattgagccgaatcaaagaagaatttattgaagcctatcttcctactggggaggatgtgaatccttcatggcaataatgaatgtcaatccgactcggatggaattgagtcggcttcgcaaacgcttgacgacggcaactcgggggcataagttattgaaagataaacaagatgagttggttcgccaattcattcagttagtcaaaaaaaatcaaaaattgcgccaacaaatggaatcagcgttacaagctggaatggaagagtatgttttggcatctagtagtattcctgatgtgatcttgcaagaagcttttatgattcctttgaacaaagtgacgttagatgttcaaagccgcacggtgatgaacatggaggtaccggtactcaatcctgtttatgaagaagaaagttcggatgatgatttttcatatggttttgttagtacgacaagtgagttggatctttctctgtcccatctggatcagattttgccagtcatgctgcaattagctgaaattgaaaaaacttgtcagctgatggcaaatgaaatcgaacggactcgtcggcgagtcaatgcactagaatacatgacaattccgaagttgacagaaaccatccaatacattgagagcaacttagcagaggatgaacgagcaacattgacacgcttgatgaaagtgacggatatcattgccgaaaatgaaacgcgctagacacaatgagaattcacccttttttcaactattttctgtcataaacagtaagattttttagttgagaagtcagtaaaactggtttgttttttctttgggaataacataagcttacggcagctattttcggctctttgtcaataaggactgatgggttgtacaaaatcaaatctgggtcagaatgaacctcattctggctcagattttttgttatcttactttgattaattgattgatcaaaaagattctaattctcatgttctcaaatgatttaaatccgtaggatactcgtttcattgtctttatatgggtattcttcgcttctatttttccattggtgtaaggatagatcatcgcgttggtgatgccttcttcataggtcaaaaggttttggagcttttcccgaaagccgtcatctaacgtttcgggaagttctgccaataaggagaaaaataagtcagggtctttgtctcgaaaggcttcaactaattcatgaaaatagggatacgcctccttcagggacgtagaaaagccaagcaatcgatcaatcatcatcgcttccgtaagaaatgggtattttggtgctcgaaaacttttccatgttttgtattcataatggttgatgtttgcacgattttttagcaaaaagcgccagttctttttcagtttttctgcctgacttttctgtcctactttacgaagttcattcatttcacggatacgcaactcattaaaggcttgattcatgtgtttgataatatgaaaccgatcaatcactactttcgcatttggcagaatacgtttggtaagctggaagtaggcggcgttcatgtctgtgactaaaaattttacttcttcaggattagtgcagcctaagaaatagcttgttaatcgaggcaatttacgcgtaggcaagacatcaattaattgtcctgtttcgccatctgcgcaaataaagctcattttatcttctatggaagcgtgcgaacgaaattcatcaaccatcaatactctgggggagaatcctcttagattgctttggtaagtagcttttaaactctttcaacgtacgaataacggtggtcaaagatacctgacaatttttcgcaataaaagataaagatactttttcagtcagtaaagaagcaattttatatctgacatgattcgcgattgaatgtctgggttgaacaaaataactttgagccgtccaatgggttcgacagtttttacaggtatagcgctgcttttttaagcgcataaccaaaggcatgtgattgtattgttcaaagcggacaatcgtttccttcttcccatttttcactacaattactttcccgtttccatctaccacagtagaaccacaatttctacaggtatggggagcaggtgtgaaaacagcatcgacgatcaacgtctttttcttctgaaaggtctcgtaagagacctctgtaatcatcaaatctttctctattaatcgcagcatttttttgatagaatcattcatatagcatatcgtcctctcagttgtttattttgtcgtgatttaatcatactagagaacgatatgttttttaatacctaaaataaaaatggggctgaagaatcaattctgattcatcagtcccataaattatagagccctattttcagtataaatctgaaaatagctgccgtgtttgtgttattcgtttgtaaagcgaatagctaatgatttctgcaatgtgaaagaggaggcttatttcgaacagaataggttgctatggaaagaatagcgagaaatttttcttcatgataaaatgaatgctagctatttctaaaccaaaacaaaaagtaaaagaagggataggtatcatgaatattgtggtattagcaggcggtctcagtcatgaaagagatgtatcattgtcttccggaggccaaatcgccatggctcttgaggaaagaggtcaccgagcattattgttggatttatatcaaggaaataacgagaagacatttgaatccgcttactcgattcaaaaataagaagagaatccttatgattattttgtggataagaatgaaccagatattgagaaacttatccaaaagaatagcaaccagaaaaatttgattggaaagaacgtagtagaactctgtctgaatgctgatttttgttttatcgcattgcatgggggtattggagagaacggaaaactacaggctttctttgatatttatggtattcgctactctggttctcattacaaaggcagtttattggcaatggataaagatatagctaaacaactaatgaaactgaatgacatccccacgccaaagtggcaaatctgggagcaaggacaagaagtgtattattctacaccttgtgttgttaagccaatcgataatgggtcaagcatcggagttgaaatcgttgaaaataaagaacaattttttaaggccttaaaaaaagctgaaaaatacaacagtaaagtgatgattgagcagaagatagaagggagagaattctctgtaggcgtacttggcgataatgttctgccagcgatcgaaataattccccaacaaggattttataattatgaaaataaatatcaaaaaggagcaacagaagaaataacgccagctgacatttcgagtgatttggcgacgcgattgagtgaaatgaccgtattagtgaacaaagttttgggcttatcaatttattccagagtagattatatcgttaccaaagagcttgatatttactgtattgaagccaatagtttaccggggatgacgccaaccagtttattaccacaagaagctgaagccataggaatttctttttcagaattatgtgagacaattgttgaactatcacttgaaagctggtacaaatagtcaggatgtcagcgattgattgaaggctccattaaaaaactgtgacaaaaggttcagctacactaagttcttcgaagcataatcactggataatggtatctctgatacatttttcctttggacctatagcccgcagaagtatgcttttcggatatttcgtttgttgaaagagtgatatcacagttttttatatgaaagttgatactagagattttttaaatcaagagacgtcagttgttggcaggttttggcaagcgaacgttgaaaatgatggtttcgtctttgctttctgccgagatatccccgccagatgctaacagaatctcttttgcaatcggaagaccaagaccagttccgcctgtggctgtagctcgggaagaatccatgcgatagaaaggttcaaagagacgtccgatcatctcttctggaattgtttttccacgattcgtcagccgaatgtgaatactgtctgattcgaccaattcaagaagtaaaggcgaatctggatagctgtagttgatggcattgcgaatgagattatcaaagacacgagctattttttcggtgtctactgttgcaagaacatttttttgtaagttgagttgccaatttagattcttttcttccaagagaggtaaaaactcaaaggtcagctgttcaagcattaaacttaaatcagtcgtttctgtctgcaaaacgatcgtggtcaaattgaagcgtgtgatctcgaagaattcactgatcaatagttccagccgttgggctttttgtaaagcaatctccgtgtaacgattccgcatcgcattggataattgtggttcttcttttagaagagtcagataacctatgacacttgtcagaggcgtccgcaaatcgtgggcgagataaacgatcaaatcatttttccgctgttccgcttctttagcggcacgttgatcttgcagacttttctcccgcagttgattcatttcctcttgaacatcaatcagatggctcgataaagtgatgcgtttggatggttcttctatcagttgagtcgtggcttggatcgtttcattcaaataaccgatggctttggtcatatagtaaatggtggtaccaaaccatatcagtaaagcgccaatcgcaacacaaaacaaccagcgatccgcaaaaaaacgtaagatatagtagataggttccgttccataccaagtccgggttccggcaataaagcgaatgactaatggaatcattacaaggaatgccagcaagattccagtggtgacgaagtattgggtcaagagctttcggatcaaaggatttctattgttcaatgatatagccgaccccccatacggttttgattaatttaggtttacgaggttcttcatgcaatttttctcttaaacgagcaatgtgtgccatgacagtattattgttatctaaatatttttctttccaaaccgcttcgaaaagtgtttcggaagagacgacggatccttggtgctcaaataaataaagcaatattttgaactcaatgggagtcaggaaaacttctttgccgtagagaatgcattgatgactgttgattttgagtatcaagccgtctttttcatattcttctactgttggagaagcagtggaatgattgtatcgctggtagcgccgcaattgggtttttacccgagccacaacttctaaaggattaaaaggtttggtgacatagtcatccgctcccaaactcaatccagtgattttgtctagatcctctcccttggcagtcagcatcaacactgggaaaaaatgggtcttgcggatctgctgtaacagttgaaaaccatcaatgtccggcaacatgacatctaaaacggccaaatcaatggcttctttttcaatataggcgatggcactagtaccatcataaaacggctgcacactaaatccttcgttttgcaaaaaggtcgtgactaagtccgcaatttctttttcatcatcaacaacgactattttttctgacatactctctcactccacctaaacatagtttcggattctcacatttccatacccccatcataccttacctggtaaacttatgcatcgttttctatttgatcctagcactgactcgtggaccgatccgacaaatcaactcattggttatagtttgtacttgctcggcagtatcgctccaatctgtcagaatttcaatttcactttcaattgggatcgtaggacaatggctcaagtctatcaaaagcatgtccatgcagatcaagccgatctgcggcaaggactgaccgcgataggaaagacaaaactcttgatttgatagagaacggggcagtccgtcacaatagccgatgctcacaacaccaacagttgtttcttgattcgcgacggcggtttgcccataaccgatcgcttcccctttggcaacgactcgcttagtgatcaactgtgctttgagggtcagaataggctgtaagcttactcgttgttttgtaggctcgttcgtatcactgagggatcctgtcaataaaatccccggacgcacataatcatagtttaagtctggataattcaaaataccataactgctttgtaagtgtgtgataccataagaaatctgtctctgatccaactctaggagaatctgatcgaagcaggcaatctgcttctgagtgcgaatcatactatcaggatttaagcgatctgccgaaccaagatgagaataaacaccactgatcgtcaagaagggcaaatcgaaaatcgaaagaatcgaatcgatagtcggtgttacacctaaccgatgcatcccagtatcgatggctaaatgacagtcaatcgctacttttctttgtgacaatgctacagcatgaccttcgctgatgatcgattgggtcaatgagtagcgacgaagttcttttatgcgttttggagaggtatatcccaagaccaagatggggcttttgacagcatttttccgcaatcgaataccttcatcaatcgtagccaccgcaaaaaaatcaattccggcttgttctaaaacaggagcaacttccttggcaccacagccgtaggcatcggctttaacgactgccatcacttttgttttcggtgagatgatccgctggatctcctgtagattatgcaaaagggctgtctttgagaattcttttacggcccttttaacgggcgttgtttgtttgtgtctaaaccatgagtgtttttgtcttaaaaagaggcaaatgaatccaatcgtcaagatcaaaacaaccaaatagttgattagattgttttgcagaatgctgattttttggctcaaaaagtgtgtgccggcaattgtataaggatgtaaaaggtaaagccacaaagatagctgtcctggatgcttccaagtcctgtggggatgccagcgcaagatcagcggaaataagaaaaagagtacaacaggcaagaagagatacatactgtcatgtttaggtatagaaaacccatgcaagtacgcactctcaataagcaatccgataagactgatcaaaaagaagagagctgttttggataaacttcttttctctgattgttttctgaccagcacacctaagcacaaaaacaatggtgtaaagaaaataccgttgcgggtaccatctaataggtggaacacagcagtatagaatggttcgattggtgtctgttggatcagtccaaaccaactatcaccacctaatccaatcaggtacaatccagccgcaagccagaacacttttttgaaggagacatgtatcagcaaacttgttaggagcaggctcccagtaatcaaagccggaaagtaccaaagatgataaagaatgccattgaccaaaagtgcttgtactaatgttccaactggtagatcgaagccgatcgtttgactatagagtgctaatggtaaaaacattagtgtggctaatagatagacttttagctgttttttgataaagttgaatactcgttgtcgcgaaggataactattggccacagcaagttctgcaaacacatagtaaccactgatcataaaaaagaaaggaacagctactcgaaaaatcgtcaatgtgattaggatatcgccttctggccataaatagtgaaggggaagacaatggatcgcaaccaccatcatggctgcaatcacacgaaattgatcgattcctttatttttcatgcgaactgcctcactgtctgagccaagtaatcatggtattcttccagagtccatttttgggcagtgatgacttggctatggggaagcccgacataacgaaaatgccaaggttcataactgataccggtgatctcttgtttatcttccggatagcgtagaataaagccataattcatcatctgctgcataaataaatcagcagcagcactatctcgaaaatgagggcagataagatcatcatcttcttgtttctttagtcctacatcaatggccagaccgatttgatgttcactgcaacctggcaaagcaacgaattgtttggtataagctaacccgttttcttttagagaatactcccacaagcgtcgctgttctttttccgtacgatacccatctaccagacgaatgtccttttctagtccggttgctcgtacgagtcgttcccattgttttgccacttctggctgcaagtaaacatcgtgatcgctaaaaggagctagcactaagtgcgggggctcttgattttttttcaatggatggtttttattgatcaattgtaatgtgttcatcgtttgtcctcctctgccagtgcaatcaattgctctactaatatttcgtaggataacccgacttccgccatcatagctgggtagcgggagtgcccagtaaatcccggcatggtgttgatttcgtttaaataaatcgctccttgattggtgacgaaaaaatcgattcgagccagacccgtcaatcccaagtttcgataaagcagctgtgcctgctccttgatctgtgattcaagcgcgagaggcaatggtgctgggacagtgatcgtggcgctgattaattggtatttctcttcaaaatcaaaaaaaccgtcgacaagagaaatcgcatcacaagcaccaatcgtcaattgctcatttcctaagatgccgcagccaatttcaatacccgctatcgccttttggatcaacacagtagaaccgtaagcaaaagcagtcgttaatgcagattggagcgctgttttgtcagttacttttgtgatcccttttgaagaaccggcttcattcggcttgataaagatcgggaatccatggtcttgaataaaacgatcgattgtggcaggatcgttttcatagcgggataaaagcaaagtgggagcactagcgattcccatggtatcagcaagttgatgcaagagccatttgttcatacataatgcggaggcagcgacatggcaaccaacataaggcaggttcattagttcaagcagtccttggatacagccatcctcgccatacttcccatgcaagactggaaagaggacatcagggacgattcgtttttctcctaatataaatccttggctagaaaaagtcagctggtgacagtttttgtgatcttctagccaagtatcattgcgaacattcgcgaggtttccttgataccaataccaatccattgttggtgcgatgccaatggtcattacttcatatttcagcgggtcaatagcttggatcacacttgctgctgaggctagtgacactgagtattctggagaattccctccaaataaaacggcaatttttttcatcattttcttcctttccttttttcttttaaggttacattcagtgtacctaggaaaagaaaagaaaatttgcggtcttcctgttgtctttctcgtatttttatgatgaaaatctaacgattttatgacaaagggcttgaagaaagcaggggaagctattgttagtgatcaaatggacaacaactcttggtacagaagtgcgttgaaggaagagctcacgcatgcaggaaagcgtacaaaaaaggaaccgagctgaactattttcaacttggttcctctgtattcatacgttagttctttggcgtagtgtgatgtgcccaattgaggcagctatagctaaagaagatacagttaagtgtgcaacagtagctgatcatcttttagctcagtcccactattttgatggaagagtgccatcaaatccggtaccgttaaggattgtttttcctcacctgcgatatcgacaacgattttgccttgatggagcatgatcaagcgattgccgtaacggatggcatcttccatatcatgagtgaccataaatgccgtcaactgctgttcttgaatcaactgatcagtcagtgccatcacagtcatggaggttttcggatctaaagctgcagtatgttcgtctagcaggatcagtttaggctgttgcaaggtcgccatcaatagtgtgatcgcttgccgctgtcctccggaaagcagcccaatctcagtcgtcagtcgattttcaagaccaagattcaagcgagctaacttttctttgaagaaggcccgatgctttcctttgacaccggaggaaaacccgcgaacctggcctcttttataagcaagggctaagttttcttcgactgtcaaacgaacggctgtccccatccgcgggtcttggaagacacgactgatttctttggagcgtcgtgtgactgaatgacgtgtgatttctttgtcacctaagacgatcttaccttgttctgttgggatcgttccagcaatactattgagtaatgttgattttcctgcaccgtttccaccgataatcgtaatgaaatcaccgctgttcatagtgagatcgatcccgcgaaggacatgattttcgttgatggttcctttttcaaatgtttggtgtaaatcactgatcgttaaaacaggtgtcgtcatgattgacctcctttggttttcggaagaaatttttgcaatccaagtttcgttcgaatttgcggcaatgaaagacagataaccaaaacgatggcagaggcaagttttgaatctgaagcttccacgttgaattcaaagacgatggccaggattagacgatacaaaatcgcaccaatcacaatcgtgatcaaacgaacccacaaagatttattgctgaaaaggacttccgcgataatgatcgatgctaatccgatcacgatcgttcctacacctgagttaagatcagcaaaaccattgttttgagctaagagggaaccagaaagagcaatacagccattggaaatcatatagccaattagtttcatattgtccgtattaattccgttggcttcactcatcgcgagattgtctcccgttgctcgcactgctagtccaatctctgtgcggaagaagagaaacagcaacaaaatcacgacagcagcaaacaggaggcctgtacaaatgactgcggtatttttcgttaagcctagtgtttgaaaccaagtaaaaacagtatcttcccctaacaaggcaatattgggtgcccccatgatccgatttgtaatagaatacaatccagtcatggtaatgattcccgctaataatgcgggaattttaaatttggtatgcaagatccctgagacaaatccggcagctaaaccgccgcaaaagcccaacagacttgccgtaaaaggggaaaggccattggtgatgctgacagcagcaatgccggctcctaatggaaagcttccctcagctgtcaaatcggcaatatctaagattcggaaggtcaaataaaccccgatcgctaataatgcccacaacataccttgagaggcagctgattgaataagtatgaaaaatgtattgattaaattcataaggtttcctcaaatcatttttaggtttttagtttcaagttagttttcatcatttcatcatatagcagcaaaattatagtagatagtagatagtagcaaaattactcaggagccacgatgctttctggatcaattcctaatgcagttgccattttctggttcacaactagctctagtttattcgctgtttctacaggtgttgtagcgggcttttcatctccatcaagaatttttgcagccaattcacccgtttgtttgcctagtgacttgtaatcgatcccgaatgtagctaaagcgccatcttccacttgctcgacagaaccagcaacgatcggtgttttggtttctttggctacttcaccaacgactgccgcagcagaagcaaaggtattatctgttggcacgtagataccatccacatctttagctaaactagtagttacttgttggacatcatttgtcgtgtttgctgtcaagactttgacgtctacacctgcatctttcaatgctttttctgccaaatctgcttggatttttgaatttgcttctccagcattatacataataccgattgttttagcgtcagggacgatactcaataacaattgaatctgtttatcgatagggaccatgtcagatgtaccagtgatattgcgtccaggagcttcattggactccgctaattttgcttcaactaaatcagtgactgcagttacaacgatcggaatatctgttgtttcattcgccaatgagacagcagctggtgtcgcgatccctaagagaagatcaggagaattttttacaagtttttcgctcatactcttcagattgtcttggctgttttgggcattttggtattctaaagtaaggttttcgccttctttatagccgccttccgccaaaccttctttgaatccttcataggcagcatctaacgaaccatgttccaccagctgcaagataccaaccgtttttttgccatcttcagtggcattgttggtattcccgcatgccgcaagtccaagtcctaaggtagttgccaataggccagttgtgatccattttttcattttcatcaaatattcctcctaaaaagtcttgatttaaacccaacggaacaaaaaaatccattcagacaatcgtctaaatggatttgaacttaccaaaattcagaaattcagtgcggccatttagaagattctctacatggctgctgttcacgttaaactgctctagccattatagatacaaacaaagtgttgtgaggtttgtatccacaatgttatgaatacaaactatctaaaatagctaaagtaagcaatattcagttgtggggatagcaataatttcatgattcttcctccaaacttgaattgttttcagtatagacgaaagttctaccatctgtcaattgaaaaacgcaatattctgaaaattttttttataacagataaagagatgtatgcaaatagtaaaataaaataaaaaagcagccagattaactaagctgctttgattaaataggtttagctttctttataataacggatcgtatttttaatttctcgaatactataaggaagatcatcagaaaaagcggcatcttgatcgatttccaatgaatcagtaaagatggcttcatattcctcaatacttaatttttgtcgctgatccaatagctgagtgtgggcttctttgtttaattgattttcataaccagctaccaaacgaccactgaaaaattcagaaacagccccagaaccataactaaaaagaccaatgcgatctcctgcgcttaaatgagacgaattttctaataacgaaatcagtcccaaatacagagagccggtatagagattgccgattctgcgactatagacgatggattcttcatagcgagccatcactcgttcctgctccgtttctacttcatcggcaaagactgctaacaatgcttttttccccatttttgtataaggaatatggaagctgattgcagcataatcgctgatgctggcttgattgcgttcacaatgagcttgccacacttttttgaaagaatcgatgtaaacttggttagatagatgcccatcgaccattggataagcgtggccgagaggacgccaaaaatcataaatatcttgagtcaacatcaaattgtcattttcaaaagttagaattcgtgggttagctgtaagcaacatggcaacagcacctgctccttgtgttggttcaccaccggaacgtaaaccataacgagcaatatcggacgcaatgactagaaccttgctttctggattggcttgaatatgggttttcgcaaattgaatccctgcggttgctccgtaacaagcctctttgatttcgaaagagcgggcgaaaggttggacgccaagcaatctgtgtaagactacagcagaggctttcgactcatcgattccagattctgtaccgacaatcaccatgtcgattgcctgcaaatcttcaggttctaagatttcttttgctgcactagccgcaaatgtaacgatatcgtgtgtttttttgctgactgccatttggtcttgaccgataccaatggtaaatttattaggatctacctcacgagcgtgagcgagatcaaccatgtctaaatagtaaggcggaacaaaaaaatttattttatcaataccaacgttcattatgacgctcctttgggtttaacttatgttataactatcgtttatacggtatcatatttttgtttaaaaatgaaaaaaattctattagaatttaaactttatttaagaatggctgattggaacagaatgcaaactcgtggggtattctttttttgtggaaataatgatatatttctgttggaggtggcatggtggaagaagttgttattatcgatgcacgaagaactcccatcggtaaataccatgggtcattaaagaaattttcagcagttgcattaggtactgctgtagcgaaagatatgtttgaacgaaatcaaaagatcaaggaagaaatcgcgcaagtgatcatcggcaatgtcctacaagcaggtaatggccaaaaccctgcccgacaagtggccctacaaagtggtctctcagtggacatcccggcatcaacgatcaatgaagtttgtggttctggattgaaagccattttaatgggaatggagcaaatccagttgggcaaagcgcaagttgttttagccggggggatcgaaagcatgacgaatgctccgtccctcagtcattacaataaagcagaagatacttacagtgtcccagtctcaagtatgacattagatggcttaacagatgcttttagtactaagccaatgggcttgacagctgaaaatgtggcgcaacgctatgacatctcacgagaggctcaggaccagtttgcctatcagtcacaaatgaaagctgctaaagcgcaagcagagaataaatttgcgaaagagatcgttccgctggctggcgaaacaaaaacgatcaccgcagatgaagggatccgcagtcagaccacaatggaaaaactggcttctttaaaaccagtttttaaaactgacggtaccgtaactgctggaaatgcttctacgatcaatgatgctgcagcattggtgttgttagcatcaaaaacctactgtgaaacaaatgatattccgtatttagcgacgatcaaagagatcgttgaagtagggattgatcctgaaatcatggggatctcgcctatcaaggcaattcaaacacttcttcaaaatcaaaaagtttcattagaagacatcggtgtgtttgagatcaacgaagcatttgctgcatcttcgatcgtggtggagtctgaattgggattggatccagcaaaagtcaatcgctatggtggcggaatttctcttggacatgcgattggtgccacaggagcccgcttagcaacttctttggtctaccaaatgcaagagatccaagcccgttatgggattgcttctttatgtgttggtggcgggttagggctggctatgttgttggagcggccaacaattgaaaaagcaaagccgacggacaagaaattttatgagttgtcccccgctgagcggttacaagagcttgagaatcaacaaaaaatttctagtgaaacaaaacaacaactgtcacaaatgatgttagcggaagacacggcgaaccatttgattgagaaccaaatcagtgagatcgagctgccaatgggtgtaggcatgaatctgaaggtggacggcaaagcatatgtcgtaccaatggctacagaagaaccttctgtgattgcagcaatgagtaatggagccaaaatggctggtgagatccatacgcaaagcaaagaacgattgttgcggggacagattgttttttctgcaaagaatccaaatgagatcgagcaacggattgcggaaaaccaagctttgatttttgaacgggcagaacaaagctatccttcgatcgtcaaacgagaaggaggattgcggcgcatcgctctgcggcactttccagcagattctcagcaggaatctgctgatcagtcgacgtttttatcggtggatcttttcgtggatgtcaaggatgcgatgggagccaatatcatcaatgcgatcttagaaggcgttgccgcacttttcagagaatggtttcctaatgaagaaatcttatttagtattttaagcaatcttgctactgagtcattagtcacggctgtttgtgaagtaccgttttccgctttgagcaaaagaggtggcgccacggttgcacaaaaaattgttcaagcttctttgtttgccaaaacggatccttatcgagcagtcactcataataaaggcatcatgaatggggtggaggcagtgatgctggccactggaaatgatacccgggcagtttctgctgcctgccacggctatgcagcacgtactggcagctatcaaggactgactaattggaccatcgaatcagatcgattagtaggggaaatcacgttgccgttagctatcgctactgttggtggtgccacaaaggtcctaccaaaagcacaagcagcattggaaatcagtgatgttcactcttctcaagagttagctgcgctagctgcaagtgtgggacttgtccaaaacttggcagctttgcgggcgcttgtctcagaagggattcagaagggacatatgagtatgcaagctcgttcactagcgatcgctgttggagcggagaaagcggaaatcgagcaagtagctgaaaaactacggcaaaatcctccaatgaatcaacaacaagcgttacggtttttaggagaaattcgggaacaataaaaaacttgtttcaacggtagcaaatgctactgttgaaacaagtttttttgtcatagacaaattgatgagtgtttctagaagctgctaaagctcatctttttaagtacatcccaatacttttgggggctgtctccacaaagccaaactgctgataaagattttcagctggacaatcagcaatcaggttcacgtaagcttggggatctacttcattatgtatatggttcattatggcgctcatgattgattttgccaatccattgccttgatcttcaggaaggacagcgatgtctaggatttgataggcagtacctctgtcaccaatcaatcggcccatgccgactaaggtttgatcgctggttcttcgaacagtcactgcaaaaagactattgcttaaaccaatcttactcgcagctgttccacgaagagaaagaccgcaggcttttcgtagagttaggtattcagctacttcaggaactgtatgttttaggagatatttagaatcgttcatcatggtcctccttgatacagagtagagttgtttagtcctagggaatttgatcaataccctttagcagatggctttttggtaatgggcaaagacgtctttaaaagaaagagacgatgatagaaggattccaacaaatgaaacagccaaaccccaacagttgagctgttcgtttttttctatcatcgtctctttagcttaacgttcagttagtggggtattcgcatactcttcgatcaatggaatcacatccagcttcagtttgtacttacgagctaaggcaggttcaacagtgaattcgccaacttcagtcgctgatatagttgccaataggcgtttttctttcgctgtatcttcaaaaatctgcacattctcggcatttctttcaacagagaatttaggaaatgcagtcattttttcttcaaaagcggcaaaaccatccgttgtttccgctgcttccgtctgagattctgagactggttcggtagcagaggcttctggttgattgacagctgatgttgctggtaaccaataagcggcgatttcttccactagattatcactaaaacgatctaatagacctttttcttgtttttggattcgtttcacaacgattttgaaattctcgtctaaaggaactgcgattttttgttctttggtcgttgccgtttgcagttcaatcaacatttcctcacggtttttagggttgatataaacggtggtctctagtccaaaatttgcagctgtcttgtgttggatcgctgaaaataattgttgacgtgccatttcataagatggccgaaattgttgttttaacttggctaattgtttctttttcatattcttctcctctcaatcaatctcgattataaggaataatgacgaaaatgaacaggggttttcatgaaaaaatgaggaatttcttttgattatcagaaaaaatggcctttctttaaatgaaataaaagaaacagccaagatcatacccaatgagtaggggatgactttgactgtttctgagggcaacaacttacttctaaagatataccaggttcatcgcatagtgctcaaagcgtcgatttgctgatatttaggcatcaaaataaacgaatcatttttaccataggcgaccaagcaattttcccatagaaaaaagcttagcggcatcttcgctttttcagcaagcatttgctgatagtctgactgatcccattgacgtgcgggaaaatgttgaacgtagtcgggaaaaatcagaaatacaaaatcaggatgcaaggctcgcttgacggcagtgggcagttgatccaaacgtgtagaatccatcgggttttccctcattagaatcctgttgtatccggattagttgctttcccaacgactccatctagttggtcgattcgctgcatatcttcatcagaaagctcaaaatcaaagactgctaagttttcctcgatacgacttggtgtaacagatttaggcagcggcaagaaaccatgttgtaaagaccagcgaatcgcgatttgagcaatcgttttgccgtacttgtcagagagttcctgcatttcaggaacgtcaaagatctttcctgtgcctaaaggactgtaagcttccaataagacattgtgctcttggcaataagacactacttctttttgtaattcaccaggcgctaagaaaatctggttgaccattgggaaaatagtggctgtttttttcagttcttcgaaatgatgaggcaagaaattgctgacgccgatggctttgatcttcccagcttgataaagctcttccatcgcgcgccatgtctctgcatttgctgactgccaattgtcacggaatttcactggatttggccaatgaatcaagaaaagatcgatatagtcggtttgtaatttcttcaacgattcttcaaaggaagaaaggaccaagtcgtaagagtgattttcattccataattttgttgtcaaaaagatttcttctctaggaatgccactttctttaattgcttgtccaacactgtcttcatttttgtaaccttgcgcggtatcgatatgacggtaaccaacttccaatgcttttttgacagcagaaacagcaacgtcaccatttggtgtttgccaagtgccaaagccaagttcaggaatcgatacattgttcgataaagtataactgttcattttcattcctccatttctttgtttttagtttagcagagaagggatttttttccaatggaagatacttctgatcaaaataatgcacaaaaaagatgtaaaaaaacttgtgttttgaaccagtttttttgtacacttgagaaatggataaggagagagaatatggatatctatttaaagcgtgcgattatgcacattgtggatcgacaaacgggtgatcccgtatactcgcaagtggaattggatctgacaacggaatacatccgagattatttaacgaaaaaaattcaaaaattagcgacacctcagacaaagaccggccgcttgctggaggactctgagatggctagattcgtcaaacaagcgccggaagcatttgtagaaagcagtgaagcaatcctgcgacgctggtatgaagtttaccaacaaagtgaagatgcaccaagtgcggatgctttcattgttttgtatgaattagataccaaactgcaattagcatttttgaaggttaattatacagatggctacacgcactttatcgacagtactgaaacaggtatcgccaataatctgattttgcatcgagcacttttagctggcaaaacccaaaaagcagatgaaggaataacgatcgatgtcgagcagctgacttacgaattagtagagaaaaaatataccttctccggagaaaaatatttctatttctccacgaaagtgattgattctgaaccgctgccttctctagaagaaaatgtcaaagtcatcaaaaaggtagctgaaaaaattggtcaaaagtttgagaccccttcttatgatgtcatcgccgatgtcaaagaggctgtttacgatacaatagaagaaaatggtcagctgcatgtagattcgattgcccaaaaagtattcaaagataatattacggctcagatggcctttcaagaagaagtagcagaaaaagggtatatcgatcaagcccctatgctgcgagaggtcagagaaatttcagaaaaaaaatatggcaaacaaaagctaaaactttccaatggtatcgagttgatcgttccattggatgtctatcgagatcctaatttgatcgaattcatcaacaatcccgatggcacgatttctgtaaccatcaaaaatgtggaagaagtcatcaatcgcatataaaaatagctgccaggctcttctcaaggagtctctggcagctatttttatttattgttgagttgatccaaagcgggtttgggtacatcttcttgtgagacttcttcccaactgaggacacctttgcggggattgactaatagtttcagataagctccttctcgtaggggcttggagcggtgttcattcattttaacgatcttctcttcacctgattcattataagccgcttgttcatatttataaatatcttgagccacaccatcactggcaattgatgttgagtgggtaccgctggtagtgatttcggtgtagtaagcagtgccgccatagtaataacggtaggcaaagaaacagccgcctaagaaaacgccaaagacgatcaaactcgcaatgatttttttcattcctgttcacctcatatctattattctataaaaaagcagacccgtccaactattttatcaaaatcaaagcaaatcttagaaattttgaataaaaacggcgaacaatgaaggagacaatattcttgactttgactaaatttgacctataatagagataggtttaaacttacaaaaaataagtaagaaagaattttttacttttgtaaggaaaagtctataattgatagtagagccgatccaacggcgctacatctcatttaggagggaaattattatggcaaaacaacattatgatcgtagtaaaccacatgtaaacattggtacaattggacacgtggatcatgggaaaacgacactgactgctgccattacgacagttcttggtaaaaaaggactcgctaatccgcaagattacgcaagtattgatgcggctcctgaagaacgggaacgtggtatcacgatcaataccgctcacgttgaatatgaaacagaaaaacgtcactatgctcacattgatgctccaggacacgcggattatgttaaaaatatgattaccggtgctgcccaaatggatggtgcgattttagttgtatccgcaacagatggtccaatgcctcaaactcgggaacatatcttgctttcgagacaagttggtgtgaaacatctgattgttttcttgaacaaaatcgatttagtcgatgacgaagaattgatcgatttagtggaaatggaagtaagagaactactatctgaatataattttccaggtgatgacattcctgttatcaaaggttcggcattaaaagcgttggaaggagaccctgatgcagaagctgccatcatggaattaatggatacagtagatagctatatcccaacaccagagcgggatacagacaaaccattactcttaccagttgaagatgtcttttcgattactggacgaggaacagttgcctccggacggatcgatcggggaacagttcgggtaggcgatgaagtagaaatcgtcggtatcaaacctgaaactcaaaaagctgtagtgacaggcgtcgaaatgttccgcaagacgatggactttggggaagccggcgacaatgtaggtgtcttgctaagagggatcactcgtgacgaaatcgaacgcggacaagtattggctaaaccaggttcgatcacaccacatacaaaattccaagcagaagtttatgtattgacgaaagaagaaggtggtcgtcatacaccattcttcaacaactatcgtccacaattttatttccgtacaacggatgtgacagggaacattacattgcctgaaggaacagaaatggtgatgccaggtgacaacgtgaccatcgatgtggaattgattcatccaatcgccgttgaaaatgggacgacgttctctattcgtgaaggtggccgcacagttggttccggtatcgttactgaaatcgaaaaataaatcagtgtttcaacaaaaatgaagcagtgactagagccttttaggacagtcactgtttctttttctaaatttctttgtgattttattaaggattttagatgatggaaaacaaacctagtcagcaaataagtttcatagtaggatagaagctgacactaaaaagataggatgtttttccatgagaaaactgcgacgattttttatttttatagcaaaaatagctggagtcctgttgcttatcggcggactgtttttaggctataaaaattatacagctctaaagaaagtgtattcttatgaagaaacaatcgctgagcaaacagaaaaatatggcatcagcgactatcaggaattagcgatgagtattatgttgactgaatcaaaaggggaaggaaacgacccgatgcaaagctcagagagtgcttacgggaaacaaaatcaatttgaaaatgcccaagacagtatcgagcaaggagtggcttatctggctaaactgatcaaaaaatctgctgacatgaactgtgatctgtggaccgccgttcaagcctataattttgggacagactatattgattatgtagccaagaatggtggcgaaaatacgctagaactggcagagtcctattcaaaagaagtgctttctcctttgttaggaaatgataatgagcaaacctatcgttactgggggtggcagtcgatcacttataatggcggttatttgtatcacaatggtggcaatttattttatgcagatgtggtaaaattcaatcaatggaagataaaaatgggtagtattttgttttcttgaaagtctctgaaatcaagcaggtaaaagacttgaaaaaacaataaaatatgatagaatcaatatgagtgattctgtctaattattcgtcgcactgattctgattggtgcgattttttacctaatgaatacgggaatacttaccgaatggaggtgagtggatggcacgaatacctcaaacggtcattgatgatattcgagaacgaagcaatatcgttgatatcgttggtcagtacgtccagttgaagaaatctgggaaaaactattttggattatgtcccttccacaacgaaaagtcaccttctttttctgtggcagaagacaagcagatctaccattgttttggctgtggccgcggaggcaatgtctttggttttttgcaagagttagaaggattaagttttccagaatctgttttgaaagttgcagaaatcagtgatatccctttagatgagcaatacaagcaaaccgaagcaattgatgcaacctcttctcagcaaaatcaattgatcgcgttgcatgaaaaagctgctgaagtctatcatcacatgttagtcaatacggctgccgggcaaggcgcattggattatttgctggaacgcggattgacgatggcactgattgacgaatttcagattggttttgcgcctaacgagcgtgcctttttggaaaaagtttttttgaatgaaaaagcaaatgcggcattttttgcggatacaggtctctttgtacaaaggaacgatgggcaacttgctgaccgtttttatcaaagaatcatgtttccgattcggaaccctcaaggaaagaccatcggtttttctggacgctggtttcaaacggaacaggatgatagcaaagaccagcccaagtatttgaacagtccggaaacaatgcttttcaataagcgtgaagtacttttcaactttgataaagcccggcgatcaatccgaaaagaaggccaagtctttctatttgaaggctttatggatgtaatcgcagcgtggcaatcaggaattgagaacgggatcgcttcaatgggaactagtttgacgaaccagcagattgccaatattgaacgtgtcgctacagaagtcatcctttgctatgatggtgaccaggcaggaatcaatgcaacgaatcgcgggattgatcttttacaagaacatagccgcgtgaatctctccgtcgttcgagtccctgaacgtctggacccggatgattatgtgcgaaagtatggtacagaggcctttttcaaactggccatgcatggcagagaaacggtgtttgcattcaaaatggactttcatcgtgccaatcgcaatttggccaatgaaaaagaacagatcgattatgtccaagaggtcttgcaagaattacagcatgtagattctttgctagaacaagaccgatacttgacacaactttcaactgaatttcatattagtcgagaaacactacagacgcaattgcgtcagttaaaacagacgcagccgaccccaacgccttcaccgccagttcgtgaagcagtgagtgtagcaccaccgccaccacgacagcaacggaaaactcaggtagaaaaggcggaggaattactgttatatcgtctgttccatgacaatacgctgaatcctcgttttaaaagtaccggtgttgcgtttattcatgataaataccaacaaatctattttttatacgatgcgtatatggaaaccgaagagcaatttatcctagcaaaattcttggattttttgaaagatgaacaaatgaaacaacaagtgatcgagatcgctgatatcaaggcttctgaagaggggacggaacaagaattccaagaccttctgcaggtatttcgtaagtcgggcattgctgaagaaatcaatcaaaaacgaatccagcagcaagaagcacgacaaaaaggaaaccagcaattagagttggaattagcaattgcgatcattgatttgaccaaacggttgaaacaagctaaatagcgaactgaaaggggctttctttcatggcagaagaaacaaagaaaacatatgacaaagctgttgccgaatttatcaaagaaaacaaaccaaaaggacaagtcgtttatgacgaactaaccaatcatttagcgaccccttattctttagatgcagacgcaatggacaagctgatccaaaaactggaagactcagggatcagtgtagtagatgagaatggggagccttccgttcatagtttgaagagcaatgaaaagcagcaagcaacgcaaccacaagaagatctttccgctcctacgggtgtcaagatcaatgatccggtacggatgtatttgaaagaaatcggacgcgtacccttattgactgccgaagaagaagtagcccttgctttaaaaatcgaagaaggcgaccaagaagcgaaacaacggttagctgaagccaacttacgtctcgttgtaagtattgcgaaacgttacgttggtcgggggatgcagtttttggacttgatccaagaaggaaacatgggcttgatgaaagctgttgaaaaattcgattaccgcaaaggattcaagttctcgacttatgccacttggtggattcgtcaagcaatcactcgtgctattgccgaccaagcacggacgattcggattccagtccatatggtggaaacaatcaataaattgattcgaatccaacggcaattactgcaagatctaggtcgcgaaccgacaccggaagaaatcggagcagaaatggatctgccaactgaaaaagtacgtgaaatcttgaaaatcgcacaagagccagtttcattggaaacaccgatcggtgaagaggatgattcccatctaggcgattttatcgaagatcaagatgcgacaagtcccgccgaacatgcagcctacgaattgttgaaagaacaactggaagacgtactagatacgttgaccgatcgtgaagaaaatgttttgcgattgcgttttggtatcgatgatggtcggacacgtactttagaagaagtcggaaaagtttttggtgtaacgagagaacggattcgtcagatcgaagcaaaagcgttacgtaaattacgccatccatcccgctcaaaacaattaaaagattttctagaataaaactgagaccacaaagacttttccaagaagtatgcttggagaagtctttttcttgtggtttagccaactttcgtaggaaaagtaatgaacttaataaaaacgtaacgaagcaagtgttggctaattgctttgaatatgataaatttaattttgtgaatcatttacacgaaggtgaatcattttggtacagagagttttttcaccaaagccagtgaataaagggcaagtctataagtgtgatattctgtagtaaaatgaaacctttcaacgatgaacagatacctgccgaagcaggttcaaaataaaaggagcaaattcgaacaaatgatgaaaacatgtcctcaatgtggatttgaatcaattgatgcacaaaagaaatgtccaaactgcggctttgagtttgttaagtcggatgaggcaaatgaaaaagaagcccctcatacgaatgagacggtatccgaaaagaatccgcagcaaaatgatgatatccgctggtctgattttaaggatgttcccttaggtgaattaattgaacatttcgaagacaagaatgaaactgatgagtcaaagaacaatcagtcagaagacgacgtaaacgtgcaagagctgataacgaacccaaatatagaacagacacccgtttcaaaagaaacgctatcagatgcgtccgaaacgatcgaatcacagtcacttgaatatcagtcagcagaacaatcgatgcacagtggaaatgaaagcaatgaagtgtctggatcagacaaaggaatccaatcgatcgcagaaagttccgcagagcccaatgatttagtagattcagccgaggtccctgaagatcacgattcggctattttatctgcttatattcgtcaacataaaaattcagagatggatgaagatgcgacagatgttccagtgataccggaagtcacggacgataaagaggctcttcctctaacggaggaacaatctcaatctggattagaagatgaacaaactgatactgcagcgattactgaatcttcagaaagccctcaatcaacagagagtccgcaaccgaaaattgaagcagaagaaacaaagcttgccgaaattccagaaaaaacagcggtatctgaaaatacgaagagtaaaaccgatccactgcccaaaaataaaaagtcacgcaaaaaattctatgtagcggctgcggcgttggtacttgtttctgcaggtggctggtattattacgaagagaccgctcgtcaagaacaaattgcgacagcaagtgagctggaccagatcgaagcggatctagccgatttttataccgacgataaccaagaatttatcaaagcagacaaaacaactacgcaattgacggcattgactgatcgactagccaagtataaaacggaaagccgttacccggacttgttggctcagtctgaaacaatcaaagaaaagatggcgactctttcggaaatcaatgggtatttcactagtccagtgatcattgaagatcaattgcagaaggtttccttaaaagagccttcggcagtgactatgtcaaaaagaacagctgaaacaccattcgatcaattagtaaatcgggcgattgatcaagggcaaaaagagtatgcccagatcgaagaagtacgaaatgcagtcaaaagcatggttgctttgaataaagagggtgaactttctgacaaagtcacgcgaaaaagctacaatgatttagtgaagaagatcgatgcattgtcgattgcttctttaaaagagcaattgactgctgagatagcaccgattgattctgcactgaagaaaaaagaagctgctgagaaggctgctaaagagaaggcggcccaagaagcagctcaggcacaagcggaaaaagccgccgcagctcaagaaacaactacggctaacaatagccagtcttctgaagctgattatgtattatcgccgaatacaccaacgaataccaataatcaaccaatcattccagcacgtgaaagtgatttggcagactctagcaatccggcttggaattgggcgcctggtgtccaagaaaagatcattgcaaccgcaattgctcgcggctatgtcgttgaagggggttatacctttgagcgcgtacgaatcgtgaatggagaaggttactataatttttatgcgaccaacaaccaaggctccttgttgaaaggaaccggtgattccgcttttccaatgtatctctttacagtgaatgccaaaaccgggtatttccgtggaaatggaaatgatcatacgattcggtgatgggtgacacttagaaaattttcagcataattacattattgaatcaaaaaacagcttgtttctcctccggcttttcgatatgatggatgataatcaatcggaaacggaggtttttttgttgcagaaaattgaaagatatgaacagttcagtgatggagttattgcctgtattccaacgattctgggttatctaggcattggttttgcaatgggcgtcgtggggaaaggaatcggcttgacggtcattgaagtcctcttgatgtcgatcattgtctatgctggaagtgcccagtttatcatctgtgcccttttggctattcaagcaccgtttacttcgatcgttgcgacagttttcttagtaaacttacgccactttttgatgagtttatcggtagcaccttatttccgttctgcttcattagtgtcaggaattggcatcggcacattgctgacagacgaatcctatggagttttaacgacagctttgcaacaaaacaaaccaatcactacccgatggactcacggattgaatgtcatggcctatttaagttggatctttgccactttcttaggagcgttgttagggtcatatattcctgattctgaagcattaggactggactttgcactagtggctatgtttgttggcttattcctttttcaagtagaggtgcctttaaaaaagaagaccaagcagacggtgctggtgctagccgctgtggtaatttcattggtcctttttatgcgaatttcaacagctgaagtagccgtgattgctgccactttgattggatgtttgatagggacggtgacacatcatgattgattttgttatactgatgatagcttgtggtgtcgttacttggatacctcgggtgctgccctttttattttcgaagaaattagtttttcctgaaagattcacgatctttctaagctacttgcccctttgtattcttggggcgctgcttgttcaaaatctgttggtttttcgtgaaggacaatttccattacttaaagtcaaagaaaccgttgcttgtttaccagcgctagtggtcggttattatacaaaagatttgatgaagatcgttgttacaggcgtcatcacgatggcggcgattcgattctttttctagtaaatcatttctaaggagagaaaaaatgaaagacttattggcatccgtttttagcggattgatcattgatgagaatgatcaaaattactttgtacaaaaaaatggtctgacttttcgcttatcaaaagcagaaggagagcaccatcttggagaagctgtggagggttttggttatcagaatcaaaaacaagaactcgtaatcactacggagattcctaaaagccgccaaggacattatgctttcggaactgtcacggacagtcgtcgagatctaggcgtctttgtcgatattggtctcaaagataaagatatggtggtatcattagatgaattaccaacaatgcgggaactttggccaaagaaaggcgatcgcttgatggtcagcttgacagtggatgaaaaggatcgaatctgggcttctttagcggatgaaaagatttttaaagcattgagtaaacgtggttcagagacgttgaagaatgctgacattacagggacagtctatcgcttgaaacttgcgggaacttacttactcacagatgatttctacattggctttatccatccttccgaaagataccaagaaccacgtttaggagaagttgtctcaggacgagtaattggtgttcgcccggatggtgttctgaatttatcattgaagcctcgtgcttatgaagcaatttcaaatgatgccgctatgatcatgacattcttggatcgagctgcagatcatcgtattccttttactgataaatcgacaccagaagagattctgcagacattcggtatcagtaaaggccaattcaagcgggcgatcggtaccttgatgaaacagcgtttagtggaacaaaaagacggcttcaccatcaaagtcaaaaaatccaattgagaatgcttgtatcttttctcattctaatttataatgattacaatattatctaagagttgacgtctcttagattagaatcgttataaattagcgatgtatggaggcctgtatgaatacaactgctgctttaaagaagacaaaaaaacaacttcatgaatcaggatttaaattgactccacaacgagaagctaccttgttggttcttttggagaatgagaaagatcatttatctgcagaagaaattttcttttttgtgcgcaaaaaaagtccagaaattggactagccacagtgtatcgtacattagaaatcttaactgatctaaaaatcgtggacaaggtgagtttcaatgacggcgtttctcgttacgatctgcgcaaagaaggagcaaagcatttccatcaccatttgctttgtttagagtgtggcagtatcgaagaagtagaagaagatctgctgacaggtgtcgaagacatcgtagagaaaaaataccattttctagtaaaagaccaccgattgacttttcatggagtgtgtcagaagtgtcagacaaaaaatgcagcgaagttgagtgaagcgtaattgctcctcagctttttttgtggttgaactactatcatatcaagctttaatttgttatgataaagaggttgaaagtaggggggacgtgtatgaaagaacagatcatcgattatttgcattatctgacgattgagcgggggctatcccaaaatacccgtaaaagttatgagcgcgacctagagcagtaccttacatttttgacggaacagcacatcaaagattggcaggcggtggatcgtgtcttgatcctctcttttttgcagcaattgcagcaatcagggaaatcctcggcgaccattattcgaatggtatcaagcttgagaaggtttcatcaatttctccgtcaagaacgctttacggatcatgatcctatgcaacacatcgattccccaaaaaaacaacagaaactgcctgatacattgagcctttctgaggttgagcgcttgatcgagacaccggataccaaagaagtgttgggaatccgcgatcgtgcgattttagaagtgatgtatgctaccggccttcgggtcagtgaactgatcgggttgcaactgaaagaccttcatttaagcatgggtctgttgcagacgacagggaaaggtgacaaggaacgaatcgttcctttaggagatctggcgattcagtggatcgaaacttacttggaagaagcacgcccttttttgactcggaaacatccagaagagagtcatctttttgtcaataatcatggaaaacaactttctcgtcaaggaatctggaaaaacttaaaggccctcgtgcgcaaggcaggcattacaaaaaatgtgacgccacatacgctaaggcatagttttgccacccatttattggaaaatggtgccgatttgcgtaccgttcaagaattattagggcatgcagatatatccacgacacagatctatactcatattacgaaaaaaaggatgacggaagtgtataagcagcactttcctcgtgcctagaaatagaggaagacatggaagaaatcaatatcaaactagatgtctttgagggaccgttggatctgttgctgcatctgatccaaaaattggagatcgatgtctatgatattccaattgcagcgatcaccgaacaatatatgcaatatattcatgcaatgaaaagtttagagttagaggttgccggagaatacttggtgatggctgctacactgatggcaatcaaaagccagatgctgctgccaaaacaagagatcttgattgaagaaaacgatccttatgaagaagatccaagggatatgctggttgctcagctattggaataccgtaaatacaaatacgcagccgaacaattatccgaaaaagcggaagaacgaagtttatactttacgaaagatccgatggatgtcgatgcctataaagaaaaaagtgatgaattggcagccaaccggttcaacacgatcgatttattcttggcttttcataaaatgcttgaaaagaaaaagagtcggaaagtactggagacaaagatcacaccagatgaaagtaccattgatgaaaaaatggcgacgatccaattggaaatgcagcaacgaaatgccaaaaagggacgacgttttgattcttttttcaccaattacagcaaaacagaagtcgttaccactttcatggcattattagaattaatgaaaaaaggatatattcgagtagagcaagaaggaaactatgaatcgatcttgctttacccagcaggtaaaacagatgagtaaatatagtgaaatagaagcgattctctttgtcgtaggagatgaagggatcggattagaagaattaagctacttagtcaatagcaaaactgcggctgtctatcagtacttgcaagaattgaatcagcgttatgaagaaaatgaagattcagccttgcatattttagaagttgggaatcattttgttttgtccacaaagaaagaagtcgcaccgttattaaagaaatacgcagaatcgccaatgggcaactctctttcgcaagctgcgttagagacattgtcgatcattgcctacaagcaaccgatcacacgaatcgaagtagaagagattcgtggggtccagtccagcggctccgtacagaaattagtcgcaaaacgattgatcgaggaaaaaggccgtgttgatggaccaggtcgagcaattttatatggaaccactgaatacttcatggattactttggcctaaaatcattagccgaattacctgatattcaagcaatggaagacgaactcgaagaagatggaccagtggatcttttttatgatcgttacaaacaagaaggagactcataatggaacgtttgcaaaaagtaatcgcacatgctggaatcacttctcgcagaaaagcagaagagttgattgtggcaggtcgtgtcagtgtcaatggtcaaattgttaaggaactaggagtacaggtgagtgccaaagatcgcgtggaagttgacggtgtcccaattgaacaagaatcgcccgtctactatatgctctataaaccacgtggcgtaatctcagcagtaactgacgataaaaaaaggaaagttgttttagacttttttactgaagttccagaacgtctctacccaatcggacgattggattatgatacttcaggtttattattgctgaccaatgacggcgatctttcacaaaaactgatgcatccaaaacatgaagtggataaagtctatgtggcaaaagtgaaaggaatcgctgataaaaaacaactattgcccttgtctagaggaattcggatcgaaggcaagaaaaccgcacctgctcgctttgagattttgtcgacagacgctgctactcaaacaagtatcgtccaattgacgattcatgaaggccgtaatcatcaagtgaaaaatatgcttaaagcagttggtttaccggtccaaaaattgaaacgggaaatgtatggttcgttgacattagctgggttgcgccctggagagtatcgggagttgacgaaaaaagaagtcaatgaattaaaaaaacaagtgaaataaccagcacacagcaaaagatgcttaaaaaatttgtcaatcgagaatttttgtgtataatgaaacatgtattataaataaaaggttcgtcttcaggggcagggtgcaattcccgaccggtggtgatagtccacgacctacttcttttgaagtagctgaatcggtgaaattccgataccgacagtaaagtctggataaagaagatagagcgtatttgatttgcctatggtttttcaaatgccctctttttccctgtggaaaagagggcattttttactttgtctggcgccgacaagtaaggaatcaaggaaatttaataggttcgtttgaagaggaatcctgaacttaggaggatttgtattaatgaacaacaaaacaagaaaaatggtaacaatagcaatgtgtgcagcaatgggaacagtcttacagtttattgcgtttcccatcatcccggcgtttagctttttgaaaatcgattttagcgatattccagtaatgatcgtcatgtttttattcggtccttttgctggcgtggcaaccgcgtttctacgttctctcttacacttgtttctatctggtttttcaccagcagatctcgtgggagacacggcaagtttcttggcatcctgtgtcttcactttgccaatgtactactttttccgtaaagggatccatgcgaaaaataaattcgtgggagtggtcacaggaatcctcgcattaactgcttttatgagtattgccaatctatatgtcatcacaccattgtacctgcgcttctttggtgttacagcagatcaattccttggcatgtcattagcgcgttatgtcagcatcggtattattccttttaacttgatcaaaggagttatcgtcagtggggtcttcttgatccttcatgcgaagttgttgccttggttggctcgtaaacaaccgcaacattcaccagttggaaaataataaaaaagatcgtatgttgcttttgagcaaacgcgatctttttatttttctaacagtatcgcccgagtaggacactttttatatgcagctaagactttttcttgctgatcttctatgataaactgttgccgagcggctggttcttgagcaaataagacgataccatcttcatcataatcaaaaatatcaggggcacagaccgcacataatccacaagcgatacagcgctcaggaatgattttgcagcgttgagacatggaattgtttcctttctggaggtaagtatagacatatggatgcttttattttagcgttgtttcatcattctgacaagttgcgtccgtcaaccatttatcaaatactttacggcaaacgaacgagttcagtattgagttatgcttttttttatgatcgcttaggttactttcaagcaatgccgaatcttgaagaggatgaatttaataaaagaatcacggcgctgattgctgccaaacaacttgtagcagatgaaaaagggtttctccagacagttgcacctgcaacgcttactgaagtagagacactctgccgtcatttaaattattttcaattcggtcgccggggggaacagatgtggcgcttggtacagctgcttgttcaagcggctgcttttcaagaaatcagtaatcgatatattcctgtggagaacactcctatgttcacagaaccggttcggcagctgattcggcagcacccaaaattgaagcaggcgttgtttactgagctttggacagtcttcgagcagattccgggagaatttgccgactttttggcagggacgttgacaggacctgagcaaattggtcagactttttttcagctgttaccagataactaccaaaaaatgccttggaatcagttttttccagcggcagcgatccactgctttttatcagtggcaaagaagcaatctcctcttttagcagcagggttaaacccgttttatcaagaaaacctcaaccaaagcatgctgaagacccgtcgcttatttctcagcgggaagtcgattgaggaaatcatggcacttagacagatcaagcgaggaacagtcaacgatcacttgattgaatgggcgatcatcgatgatcagtttccttatcactattttgccacaaagcagcagttccctccattgtcatggaaattaccttatcacattcttcaaaaagaagtgccgctggattttttaagtatccgaatcaatcaaattgcacaaaagcgagggatcctatgttagaacaggcgctcaaacactattttggtcattcccattttcggacaggtcaaaaagaagtgatccaatcggttctgaatcatcaggatacattagcaatcatgcccactggtaacggcaaaagcttatgctatcaactgccgggttatttgctggaagggttggtagtaatcgtatcaccattgctttctttgatggaagatcaagtgtatagtttgcaaaaaaatggtgagagacgagcgatcgcttttaacagtctcttatcattcgctgaacgaaaatttgttcttagccatctacagcagtataaatttttatttattagtcccgagatgcttgttcaaaagacgattctccaagcattggcaaatagtagaatcgcattgctggtcgtagatgaggcacactgtgtttctcagtgggggatcgattttcgaccagaataccttcagctagctgcggtcaaacaacaattaaaagcaccaacgactctggctttgactgccacggcaaccgaacaggtggcacgagatattcaacaaaaccttttaggaaaaacgcatcaagtttttcgctatggaatggatcgcaaaaatattggactgatcgttgataaaagcggcgaagaaaaagacacgcttttaatgcattacttgcagcaattgtcaggtgcgggaattatttattgtgccactagaaacaaggtggaagaactttatcaaaaattacgcggcaagtattctgtggggtattatcacggtggattagccggtgatcagcgtaaagtccttcagcagcagtttagtcggaacgagctgcagttattgatcgccacaaatgcttttggaatggggatcaataaacaagatattcgctttgtgatccattatgatctgccggattcgttagaaaactatagtcaagaaattggccgagcaggtcgagatggcaagcaaagctatgcgatcttactctatcgtcctggagacgaaaccatccattatttctttcaaaaggaactaagtgcagaaagagaacagctggaaatgacgccgcaatctttgatgctttccccattgcaggaaaaatggcaagcaaaaatcaatgagcatggtgccaacaaatggtttgctattttaaagcaaaatgagtgggaaaaaaagcagcagctaaaaacgatgctcgaatacattcactgtactagttgtcgacggtgttttttattggctcattttgacgaagaaaaacaaccgcttgaccagtgttgtgatatcgatggtattgaaattcggcttgaccaaaaggaattcaagccgcaaagaaagaactcgtggcaggaacgtttactaaaaatttttaaagaaacaaattgaatcgttttttaaaagacagttcgattcaagctatgttataatacatcggaaggatattaggaggtaatacgagtgagcaagaaagacaaaaactataattcagaaaatcaagagccgtgggaacaaccaatttatgatacagaatatgaagattctgcctcacgatcacaacagcggaaacaaaaacgcgggaattcactctttttgacgatcgtcttagttttacttttcttgatcgttgcaattcctgttggcgcggggatttgggtcttaaaccgctcaaatgatacagcaactgttgcctcatcaacaagtagcagtacagttgccagcacagaatcatcgactgttgagtcatcgacaaaagtcagtgaatcatctacttccagcagtagttcgtcatcgtcatcatcatcttcttcctcatctgaaagcagtgagtctgaagagccagcgaacagtgaagcagaaggaaacaacacccagaacaatcagggaaatgcagaccaaggaacgacgaatcaaggtgcagcgaatcagggagaaaccaaccaaggaacagagcaatatacgactgttcaagctggtgaaggtccagaacaagtagcagcacgtacaggtatttctgtcgagactttgtatcaattaaacgggatcgatccaagtaatttcatgctttacccaggcgatacattacgaattaaataaaaaaccgctttggcggttttttttcttgaaagttaaaaggccgttgatcggtagttgttgagaaggagtaacaaatgaaaaaaatcaatattgccatcgatggtccagcttcatcgggcaaaagtacagtggcaaaaattttagctcagcattatggatatgtttatacggatacaggggcaatgtaccgtagtatcacttatttagctcttaaaacagggtgctcattagaagatgaaagcgggcttgtggcattaatcgatacttatccaatcacttttgcgccaactgagacaggacaagatgtttttgtagatggaacaaaagtgacagaagagattcgccagcccgaggtaaccaacgctgtttccaaagtttctgcttatcaaaaagtccgggaaaaactggtccaacagcaacaaaaaattgctgaaaatggcggtgttgtaatggacggccgcgacattggcaccgcagtcttacctcaagcggaagtaaaggtttttctcgtggcgagtgtagaagaacgagcagaaagaagatacaaagagaaccagcaaaaaggaatcaccacctcctttgacacattaaaaaaagaaatcgagcaaagggattatttagattctcatcgagaaatctctcccttgaaacaagccgatgatgcagttcgcattgatacaacaggaatgtccattacagaagtcgttgcagcgattcagcaaatcgttgatcaaaaaatggaataatcaaccactggcgctagtcgacctaaaaaaacagaaccgaacgattctcatgagaaatttcattaaatatcggaattttcgcgtagaaatattgttcgaactctggggttttttaggtcggaggggctatttttttttgtatgaaacagtgattttgaagcaaaatagtgaaggaaacgttttttgagaacaattattgacagttttttgtgaaaataagcgaaatcgctttatttttttggcattctaatttaaactaagggatgtagtgcatttacgtacaattgttggttaggaggacacaagacatgacagaatttgaaaataatcaagtggagaatgggaatgaatcaatggaagctgctttggataacttccaagaagtgaacgttggcgatattgtcaaaggtgaagttttagccatcgaagacaaacaagcgatcgttggcatcgaaggagcaggtgtagaaggagtcgttccagcaaaagaattgtctacattgcctgttgaggatatcaatgaagtagtcaaagtgggcgatgttttagagttagttgttatttctgcaatcggtaaagataaagaaaacggcagctatctactttcaaaacgtcgtttagacgcgaagaaagtttgggaagatatcgaaaaagatttccaagcaggtaagatcattgaagcgcctgtaacaaatgtagtcaaaggtggcttagttgttgatgttggcgtacgcggatttgtgccagcttcgatggttgaggaccactttgtagctgattttgaagattataaaggcaagacactcacctttaagattgttgagatcgaaccttctgagaaccgcttgattttatcccataaagcagtggttgaggctgaaaaagagaaacaaaaagaagccttgctagctgatctttatgaaggtcaagaaatcgaagggaaagttgcacgattgaccgattttggggctttcgttgacttgggtggaattgatggtttagtacacgtttcagaaatttctcatgcccatgtaggcaaaccgagtgatgttttatctgttggtgatactgtcaatgtccgtgtcttatccgttgatccaaataaagaacgcgtatcgttatcgatcaaagatacattgcctggaccttggagcaatatcgaagaacaagcacccgttggtagtgttttagatggtgtagtaaaacgactaactagttttggtgcttttgtggaagtcttccctggtgtagaaggattgatccacatttcgcaaatctcacataaacatattgcaacgcctcatgaagtgttgcatgaaggtgatcaagtgcaagtgaaagttcttgaagtgaatccaaccgatcatcggattgctttgagcatcaaagcactagaaaaagccgaggaagcggaagaagcgcctgcagaagatgactatgaattaccagaagaatccactggttttaccatgggtgatatcttgggcgatgcgttgaaagataacgacgaagaataatctagtctagcagcttataacgattcgttttttgaatttgttataagctgcttttttgtttgtcatcaacacttgcaagttagtgatgcattaggtaaactaagaaagattgaaaagcagaagcagctgtattcagcagtttgcttcttataaatggagggtaaaaaatgtcaaatccaacaattgcgatcgtcggacgtccgaatgtcgggaaatcgactattttcaaccggattgccggagaacgaatctcgatcgttgaggatactccgggtgtgacgagagaccgaatttatgcaacaggtgaatggttaggtcgagagttcagtattatcgatacaggtggaatcgacttaggcgatgagccgtttatggatcaaatcaaacatcaagcagaaattgcgatcgatgaagcagatgtgatcgtcttcattacgagtgccagagaaggtgtgacggatgcagatgaacttgttgctcgccttttgtataagagcaataagcctgtgattctagcggtcaataaagtcgacaatccagaaatgcgtgcagatatttatgaattctatacattaggattaggtgatccgtatccaatatccggcagtcatggattagggatcggagatgtgcttgatgaagccgttaagcattttacagaagaagcagaggaagaggatgaatcgatcatcaaatttagtttgattgggcgaccaaatgttgggaaatcttcgttaatcaatgcgattttaggtgaagaacgtgtcatcgtttcggatatcgaaggaacgacccgggatgcgatcgatactcattttacaagtgaaaatgggcaagagttcactatgattgatactgcaggaatgcgtaaaaaaggaaaagtttacgaatcaacagagaaatacagtgtcatgcgagcgatgcgtgccatcgaacgttccgatgtggttctaatggtcttgaatgcggaagaaggaatacgtgaacaggacaaacgaatcgctggctatgctcatgaagctggccgtgggatcatcctagttgtcaataaatgggatctgctaaaaaaagaaaccaataccatgcgagactttgaagcggagattcgtgatgagtttcaatacttagattatgccccaatcatctttgtatcagcggcaacgaaacagcggttgaatcagttgccagctttgatcgaagaagtcagcatgaatcaaaacatgcgtatcccttctgcattattgaatgatgtgatcatggatgcagtagccatcaatccaacgccaacggataaaggaaaacgattgaagattttttatgcgacacaagttgcggtcaagccaccaacatttgttatttttgttaatgaagaagagttgatgcatttttcttatgcgcgctttttagagaatcagatccggaaagcatttacttttgaaggaactccgattcgaatcattccaagaagacgaaagtagcgattttatcatactttgctgcttttgacaaagaattctattcttttgacagaaaaacgataaatcctaaaaaaaacagtagtaaaaacgttaaaatccttgatattacaacgttcttatgataacgttatatcagaatattgatggatatcaatatttgacaaaaaacttggaccactcaagatttttgttgatgtatgacatcaaaaaaataatcaggaggtgaaaccatccatggcaaataaagcagaattaatcgaaaaagttgcagcagctactgacttgacaaagaaagacgctacagcagcagtagacgctgtcttctcaacaattcaagacgctttagctaacggtgaaaaagttcaattgatcggctttggtaactttgaagttcgttctcgtgcagaacgcaaaggacgcaacccacaaactggtgaagaaatcaagatccctgctagcaaagtacctgcattcaaaccaggtaaagctcttaaagacgcagtgaaataattgagtcttccaaacccttgagtaatcaagggtttttttgtacataaatttacttatccctattttcatcaaaaatccaatgtagatccgtctactaaaagtacatttatcggagcaattgcaaaaaaattcagaaaatttattgacaagaattttttttcgcgctatattattaaacaattacaagaaaacagcaaatattttaatgaaggagccattttttatgcgcaattttaatcaatatttattagtcattattattgagaccaggacttagaacacggaagcaaaatttatccgtttgtttgagtcctatttgcgtaagtaaaatgggattctggcaaagcatcccagtttattataaaccggggtgcttttttttatgaaataggcgggagatgatggaattgagaagtgatcagataaaaaaaggcattgaagcagctccagcaaggagtttgctttatgcaacaggacaagtaaaaaatatccaagatatgaataagccttttattgccatttgcaactcgtatatcgatatcgtacctggtcacgtccatctgcgagaactggcagatattgccaaagaagccattcgagaagccggggggatcccttttgaattcaatacaattggggtagatgatggaatcgccatgggacatatcgggatgcgttactcattgccaagtcgtgaactgattgctgactcagctgaaacagtcatcaatgcccattggttcgatggtgttttttacatccccaactgcgataaaattacgcctgggatgatcttggcagctatgcgtaccaatgtgccagcaattttctgctctgggggacctatgaaagccgggattgatcctaggggccatcagacgacattatcttccatgttcgaagcagtcggcgcctttaaagagggcaaaatgtcacaggcagattttgaattcatggaaaaaaatgcctgtcccacctgtggttcctgtgccggcatgttcacagccaattctatgaactgtcttttggagattttagggttggcattaccaggaaatgggacgattctggcagtttcgcaagaacggcgggaacttgttcgcaaagcggcattccatctgatggatctagtgaagaatcaagtcaagcctcgggatatcgtaacagaagaagccatcgatgatgcgtttgctcttgatatggctatggggggctctaccaataccgtcttgcatacattagctattgcgaacgaaggggagatcgattacgacttgaggcgggtcaatgagattgccgaacgagttccttatctctcaaaaattgcgccatcttccgcttattccatgcacgatgtccatacggctggcggcgtctctgccattatacggcaattggtcgatatcaagggggcgatccatccagatcggctgacagtcacaggcagaaccttgcgggaaaatgtcgctcaggcgacaatcaaaaatgaagaagtgattcatccaaaggagaatccgtacagccctgtcggcggcttatcgatcctttacggcaatcttgcgcctcagggaagtgtcatcaaagtggggggtgttgacccaagcattcagctttttaaaggaaaagcaatttgtttcgattctcatgatgaggcagtagccgcgatcgacaatcatacggtccaaaaagggcatgtcgtggtgatccgctatgaagggcctaaaggaggtcccgggatgccggaaatgttggcgccgacttcgagtattgttggacgagggttaggcaaagaggttgcactgatcacagatggacgcttttcaggagccacgagagggatcgcagttgggcatatctctcctgaggcggcagccggtggtccgatctctttgatccgtgatggagatgacatcgtgattgatctgcgaaatcgctcattggaagtattagtctcagaggaagaattaatgctgcgtgcacaaacacgtccgaagtttcgggctaaagtgaagaaaggctggctggcacgttatacggcattagtcacatcagcaaataccggggcgatcatgaaaatcagcgaggaggaagtttaatggagaatatccagttgaatgaagtaactaggaccggtgcagaagtgttagtcgatagtttgcagaaacaagcagtagaactgattttcggataccctggcggtgctgtcttgcctttatatgaccaactctacgatgctgcgattccgaatattttagcgcgtcacgaacaaggtgctgtccacgcagcagaagggtatgccaaagccaccgggaaagccggcgttgtcctagtgactagtggaccaggagcaaccaatgtggtaacaggtatcgctgatgccatgagtgattccgttccattagtggtgatcaccggtcaagtagcaacagccggtattggcaaaaatgcttttcaagaggcggatattctagggatcacattaccgatcactaaacataattaccaagttagacatgtcgatgatttgccgcgagtgatcgcagaagcttttcatatcgctaccacgggtagaaaaggtccagtggtgatcgacttgccaaaagatgtcacgcttcagcggacagccgcagtcattgaactgccgattgagcgaaaaagctatcaacccaccgtctttccatctattttgcaaatcgagaaattgatgaattgtttaaaacaagcaaaacgtccagttgtcttggcgggagcaggggtatgtgccgccaatgcagccgaagaattgcgtctgtttgtcgaaacccatcatttgccgattgtaaccacgctcttaggtcttggattggtgccagcagatcatcccttattcttaggaatggggggcatgcatggcacgtatgctgcgaatatggcattatctgaagcggatttgatcatcaatattggctcacgttttgatgaccgattagcaacagccggcagtcaatttggacaacaggcaatcattgctcatatcgatattgatcctgcagaaatcggaaaagtcgttcaaacaactattccgatcgtggcggatgcgaaagcagctttgacccagttgctgcgctatcctgcggaggaattagattgcaaggaatggctcaatcgttgtcaaaaacggaaaaaagaacatccttatcggtatgaccgcgaggaaacaaaggaaatcaagccgcaaaaattgattgaagaagtgggacgcttgacgaaagaggaagccgttattgttaccgatgttggtcaacaccaaatgtgggtcgctcaatactatccttttcgatttcccaaacagctgatcactagcggaggtttaggaacaatggggtatggcatccccgcaggcataggggcaaaatttgcttgtcctgaaaaaacgatagtcgtttttgtaggcgatggcggtttccaaatgaccaaccaagagtttgctctgctaaatgattatggtctggatgtcaaattcattttgatgaataaccgctctctcgggatggtacggcaatggcaagaaacgtttcataatgaacgccgttctgcttctgtatttgctaaacagccaaattttggccaattagcagaagcgtatggcatcaatagtgtgcggatcgaaaccccagatcaattgaccaacgatttggccaatgcattgctagaacctggtgcacgactaattgaggtactgatctcgccaacggaacatgtgctgccaatgattccaccaggaaaagccaatcatgagatgataggagtttaaaagactatgaaacgtatccttgctgccatcgtgcataacgaagctggtgttttaagccgcgtcaccagtgtgttgaatcgtcgtcaggtgaatatcgaaagtatttcagttgggaccaccgaacagccggaattttcgcgaatgacgatcattatcaacgcagaaaacccactggagacagaacaagtgacaaagcaattgaataagcaaatcgatgtcttaaaagtttcagatattacagaagacccccatattgaacgggaattagtgctgatcaaagtgaacgcgccaacgactacacgttcggagatccaagctgtgatcgaaccatttcgagcccacatcgttgatgttgcattgaagactatcgtggttcaagtagcgggagactcagagaaagtagcagcctgtatcgacgtgttgcggccttatggaatcaagcaaatggctcgtaccggtgtgacaggtttcactagaggttaaatgcaagaacagttgcttttaataaaaaaagatttcggagggaagcatacatggtaaaagtatattataacgaagtgacagacaatttaggagataagactattgcaatcattggttacggttctcaaggacatgcccatgcacagaatttacgggatacaggacacaacgtcgtgatcgggattcgtgcaggaaaatcagctgagaacgcaaagaatgatggatttaccgtgcttccagtttctgaagctgtacaacaagcaaatgttgtgatgatcttagctcctgatgagatccaaggagaactttacgagaaggaaattgcgcctaatctttctgcaggggatgcattagcctttgctcatggctttaatattcattttgaggtcatcacgcctccaaaagaggtggatgtcttcctggtggcacctaaaggaccaggccatttggtgcgccggacctttagcgaaggatttgctgtccctgcgttgtttgctgtttatcaagatgctactggcaatgcacaagagacagccttgtcctatgccaaaggaatcggggctacaagagtcggtgtactagaaacaacgttcaaggaagagacggaaacagacttgtttggggaacaagccgtattatgtggcggactgacaagtatgatcgagactgggtttgaaacgctggtagaagccggctatcagccagaactagcctattttgaagtttgtcacgaaatgaaactgattgttgacttgatttatgaaggaggattcgccaagatgcgtgattcaatctccaatacagcagaatatggggattatgtctctggttcacgaatcattaccgaacaaacaaaagccaatatgaagaatgtcttgaaagatattcaaaacggcacgtttgccaaaggttttattgcggataatcaagctggttttccggaattcaaaaaaatgcgggaacaaaacgggaatcatccaatcgaaaaagttgggtcagaattaagaaaaatgatgccttttgttacgaaagattaaggaggaacagtgattgctggtatctgtcgatcaaatagaacaagcacatgaaagcttgcaatcagtcgtttcaaagactcctttacagcatgatcggtttttatccgagaagtatcaagcgactgtcttactgaaacgagaggatcttcagaaggtccgatcgtttaaattgcggggggcatattatgcaatcgcacagcaagatccggctatactgaagcggggggttgtctgtgcaagtgccggcaatcatgcccaaggggtcgcctatacctgtcatgaattgaaagtgtcggcggttatctttatgccgacgacgacaccgcaacaaaaagtagcgcaagttttgttttttggcggtgattttgtccgtatcgaacttgtcggtgataccttcgatgcttccgccgaggcagcccaacactatgccgaagaccatcaaatggcgtttattgatccctttgatgatcccgccattattgcaggccaaggaacattggcagttgaactgctggcagaagcaaaacagcgcaattattctatcgattatgttgtggcagcaattggcggtggcgggttgatcagtggtgttgcaacttatttgaaagcaaaacagcctacaatctcaatggttggtgctgaacctctaggcgccgcttcgatgcaggcggcttttgataatcatggtccgaccacattagagcagatcgataaatttgtagatggagcagctgtcaaaaaagtcggtcaattgacctaccagcatgcagctcagtacgtcgatcgaatagtagcggtagatgagggtttaatttgccaaactatcttggacttatacagtaaacaagcagttgtggcagaaccagcgggagcactgagtgtcgccgctctggaattgatcaaagaagagattaaagggaaaaccgttgtttgtattatcagcggcggcaataacgatagtactcgaatggcagagattgaggaaaagtccttgatttatcaaggcttaaaacattattttgtggtcaattttcctcaaagacctggggcgttgaaagaatttgttagcaatattttgggtcctacggatgatatcactcgatttgaatataccaaaaaaatcaatcgcggaacaggaccagtactgttagggattctgctaaaaaggcaggaagatctgcccccactactggcgcgaatgtcaagatttgatccacaatatattgatttgcgggacaatcaatctctctatactcttcttgtttgattttatgaaccaagcgttacgaaacaaacgacctttttaaaaaaaagaggtcgtttgttttttgatttcaaatccatggctttccctcatcctttcgctagttagtaggtgaaatggttgattcttgttataatagaagtaacaaatcgtagatggggggcggatgtatggaatttgtcttttctagaaaagaacagcagacgcaaatcttgtatggagaaacattgaatgctgttttacggacgcaggaaatttccaatgatcaagtcatcattctcacaaaccagcggtattatgatcgtttctctgaaaaactgacccgtttgtttttacccaaagaagtcagctggtatatttgtaccaatcaaatgtattgcaataattttacggaatttcaggcctttatgtccttcctaagccgcttttcgaaacaggagaactatttgatcgtgggtttcggcaatgaaggtgtgctggcgttaagtagttttattcactacacgtcgattctgactagcgatctttggttgatcccggtgtctttacgggcgttagctaaaagtgtcaaagaatctgcgatcattgttaagaaaccagatattcctgttttgcaaagtcccaatgtaccgcaagtggtcgtatacgatcaaacgattgctgaaaaacaaaaagatgggaagttggtggacttacttgtattgattcgttgcggactgctcacggatcaagcttttctgcgggaactctttcgcacgtttctgacagaaaaacaagtaaacaatcgttcgtttgcagcatatacagatcgggtgatccaagcctatcaagcaaacggtgcagcacttgaagaatatggacaagtctttacagatgctttttataagactgaaaatggacatttgctgtctgatgcaatgaaacttttttatggcctactctttcacttaatctggaatgttcaacaacagcagttagcagtcaaattagataagctttgcttgtggcttgaccaactagggtttcctttagtattgcctgaccaactatctttaagcgactattttcagcaagttctgctgttacagaaaaaagagaaaaaactgctttttttatcagaaattggtacaatagggggcagaaccagcgcattagaagaggatctcgtccagacaatgagcgcttaccaaacaataatcaatcagataagaggaacttagatggaaacatacagtgaaaaaatgttacaggcattagcagccgagaatttagctgatgcgcaattgaattttgcaaaagccctgcaatcagatcaaaatgaagtcttagccgaattaggagaagaattgatccaaatcggctttttagaagaagcaagagaagtatttgatacactgcaagaacgtgaccccgaaaatgaagaatggttgctatcgttagcagaaattgctatggaaaatgatcaaatcgacgaagcttttgattatctagatcgaatcacaccgcaaagctctttttatccacgagcgttattgatcagtgctgatctctatcaattgattgggatccccgaagtcagtgaagcaaaattattggaagctcaaaagctgctgcccaaagaatcgctgattcgttttgcactagcggaattgtatttttcaaccgaccgttatcaagaagcggcagagttttatcaaggattactaaaggaaaatatccaggaaatcacaggtatttccttattggaacggaccggagccgcattgagtatggctgggaaatttgaagaagccatcgaatatctggaagcaagtctagctgaggatcaaacagatgaccgtctattccaaaccgctttagtttacttacaattaaaagaaaatgagcatgcgattcgatatttgcagcagttgcgggcactgaatccgcaataccgttccttgtatctctatttagcagaggcattacaagaagaagagcaactggaagaggcacaaactgtcattgaagaaggaatccatgaagatccatttcaagtggatttttatcattttgcatcagaaaatgcgtatcggttgcatgacagcgaagcagccgaatccttcttattaaaagcccttgagacgggggaaaaagaagatgaaaccctgcttacactgagtaatctttatttgaatgaagagcgttggcaagaagctgtgttggctatcgagaagatggaagacaatgaacaaccccatgctctatggaatttagcacaggcttataacgcgttagaagagtttgaccaagcagcgaagttctatgaacaagcgaatgaaggattgcagcatgaaccagcttttatgaaagaatatggattgttcttaagagaagaaggacgattatcagaagctctacctttactgagacattatctggctcacgaacctggtgatctggaagtgcaatcgatcgtggaggatctattagaaagataggtgagggaaatgaacatcaatgtacaagaaaagaaaaaatttctcaattggttagtttctactgtatcattcagccgacgagaagtttcttgggttctgaactacctagcaaatcatgaagccattttgacaaatgttcatattgttgaaggggcgatgcagacagatcgggggttgagtgttcgcagtacagagattggcggcgagccatttgtgttgacgatccagaatcaaaccttttatgatatcgatcaaatttttcacgaaatcaggatgaattggaaacagccgctttatttagaatgtatctttccaaatccttgggaaaaaccactttatttagctgttctggaggacaatccttttgaacggtggaatgaccatgttgacgaagaagtacaaaaaaatgtgacagaatatcttgacaaagaagctatgcagctaaaaattgagaaattataccgccaaatcgatcttgctttggaaaatggggatcgggatgcttttttggaattatcggatgaagtcaaccgcttcaaactcgatcaaaaagaaaaaagtcattaataaagctattaaaaagcgctatgtgaagtaataaaaactagtggaacagaaaagaaccgcaagaaagaagaggactcccagcaccgagcgttcgtcgtttgcaacagtgtgcgggagaaatcaagtttcttgcggttttttctttataattagataggatggaagaatggggttatctttttgattttgctgccttgcgttgcaaaaatcgtgatttaggacgtaaataagtgaagccttccccttcgacttcatggacattgatcaccgacacgaacgcttgttgatcgaagtcggcaacgatccgtttgacctctgaaatttcccggccgcttactaccatataaatgatccgtttgttaccaccggaataggctccttccccatttaaaaaggtgacgcctcgttccaattcattcattaagacaggggcaatttcttcactatgattactgataacaatgatcccttttgctgaatagccgccatctaggatcgaatcaatcacgcgagcgaaaacataggaaaagattagcgtgtacatcatgcgtttcaaatcgatataggttaaggaaagcaatagaacgaaaacatcaaagatcaagagagaacgaccaatcgtgatcccaaagttcttttctaggatccgggctaatacatccacgccacctgttgtcccaccaactttataaacaacaccactgccgatccctgcaattagtcctgcgagtaacgcaacgatcagtaagtcatgctgcagatcgatcaataatggaaccgtctgccagaaacctaaccaaaatgaaagaccaaaggttccaatcactgtatagactagcgaacgtctgccaagaatcttacctcctagcaaaatgattgggatattcaaaatcagtgtactgtaagcgggattgatgtcccacaatgcgcgcatgatcaacgtgatcccagtgacgccgccttcagctaaatcattaggtatatttaaatagacgagaccaaaaccatagacactcgttcctagaacaattaaggcaatatcgcggactgtccgccacgaaaaaaaagatcgcatcctgtttcccccatttctaaatctcacaagtaccaatttagcacgaaatttggcattaaacaatatgagcaagtcgatcctctatctaggcaggtgcgttttcttttgctaaaatgtgaaagaaagggtgaagaggatgacagaaaaacgttcactatatgagatgcaagaagaagtcgatgcctatatccaacaattcaaggcggggtatttcagccctttagcacagatggcccgacttactgaagaagtcggcgagttggcaagggaagtcaatcatcactatggggaaaaggccaagaagaagacggaagtcgagaaaacagttgctgaagaactaggtgatgtcctttttgtcaccatgatcatggcaaattccatgggtatcgatttgacggaagtttttgaatccaatatgaaaaagttcaaccgcagagatgcgtatcgctttgaaagaaaagatgggaaaatgaatgaagctgactaagttaccacaagaatttgaacaagcaatccctgtattgcaaagaatcgaagcagccgggtttgatgcctactttgtgggaggaagtgtcagagatacaatcttaggacagccaatccatgatgtagatattgcaacaagtgcctttccagctgagatcaaagaactttttcctcgtaccatcgatttgggtatcgagcacggaacagtccttgttttatgggaaaatgaacaatatgagatcacgacttttcggacagaagaagcctatcaagatttccgtcggccagacaaagttgcttttgtgcgctctttggctgaagatttgaagcgcagagattttacaatcaacgcttttgctctgaaaaaagatggtgaaatcattgatttgtttgatggactggcagacctgcaactgaaaattctgcgagcagtgggtcagccgcacgaacgatttcatgaagatgcactacgtatgatgcggggcttgcgctttgtcagtcaactgggctttacattggaaccacgaacatttgaggcaatttatgacaatcatcagctattggcaaaaatatccgtggagagaatcaccattgagttcgtcaaattgctgttaggggcacatcgcaattcagctttaaaggcttttgtagcgactgaatgttatctctattgtccaggactgaaacaagccggtgaagctctgttgcgaatggctgatttaccggagagaccattgaacaatgaagcttctgcctggacactattgattgaccagattggactttctacagcagaagttcgtccttttttgaagcaatggaagtgttccaatgaattgattcggatggtccaatcgttattcgagggagtattgttgcggaaagcagggccgtttagtgatgaagcattataccatctgggcagcgaggccgctcgactatcagaagaattgctatactattacggacaagaggtagatccctctgttagtcaagctcgctaccaggcgttgccaatccattcacttaaagacttggccatcaatgggcgcgacttgctgagccactttgaccaatccggcggtccttggatgaaagaagtgctagcagctgccgaaaaagcggtgattgagaaacgagtcgcaaatgaagagaaagcattattggcttttgccaaaacaatcgtattaaataacctataaataagcaggtgagaaaacaatgatcgaaaaagaatttttggttaccgaggaagatacagctcttgcagttggatcgggaggactgcctgtcttagcgacccctcgtttggctgccatggtagaagctgtctgttttgaagcattggaatcgcgtatagcgtctggtaagacaacagtaggaacacaatttacgatcgagcaccgggcggcttcaggaatcggtgcaaccgttcaggtatgctgtgaagagatctcgaatgaaaagacgtatgagtttacttttcgtgtctatgaaaacgatcaactgctagcgacaggtacgcatcatcgagcggcggtcgatatcgaaggttttttaaaaaaagtgagcgagaaagaaagttaatttgtgctccttagcagacaatgtgttaaaattgaaatgtattattaaaaaaaaggagcgttatgtcatggcaagagaaatgaaagcattgaaattttatttccgtaatggagaaacatggacgattgagcgccgttatattggagatttgtggatcaagcaaatcactactagttttggccgcatccacggaagcgaatttgttgagatccatccatgtgcaggattcaaaattgaaatcttccaagaaggggatcatgttgcaacacatgatatcaatttaggtggattggaattaggcatgttcgcccgcgctttgaaatacgaagatattgaacgaatggaaattctttaccgtaatggaacacccgatcttgtgtacttcccatacaaagacaaagatactgaaggattagataacgtttatcaatcaacaaaaatcagtgaaaaaacaaaaagcctttatattgtgattgatccaaaccaaacagtcgaagacgtttaccaagaacattttgaagaataaaaaaaagcagaactgagagcttctctctggttctgctttttcattacaatcactgataagtgcgaaaaaagtcggtatatttttttaataaaagatagtcttgactgacggcatctttaagtatgattttgtctccaagcaagcttttacgagcattttggatgatgcggtgttgaatatcatgatcgatcaagtaatcgatctcagtacgtttgatttccggagaagcactctcgcgatttttttcaagatactgcaaaagatcatattcaagatgtccggcatcattgattactcgtttgtattcgattttgtctaccttcacacgatcacgctcctttatatgataagttaccttatttccggagtaatgtaaaaaaaatctatatgaattagtaaatttttaaacacctgtttggtattgcatcaaaactactttacgcttagaagaaacagctagatgtgtcgcaagacttaaacagaaaatgaaaacaaaggagaaacagatgaaaaaagcaagagttatcgttgttagtggagtgactgcttcagggaaaaccacctttatccaaaaggtcgccaatctatgtcccggtacagcagttttatcttttgatgattatagtatcgatgcattgccttctgcaccatcctctgaggctctgttaaacgaaccctacgaagcaatcaatcaatttgatattcaaccattgataaatgacctaaaacaaatcattcaccactgtgcgctgatcttgatcgattttccgtttgggtatgtccatcagcaactcgcacctgctatcgacaaggccatttatttaagaacacctctggatattgtcttgggtagactaatcattagagactttcaacaacagccagagaaaattattaattgggtcacggggtatctagaggaagcgcgaccgctttttttgatgcacgaagaaattgtttctccacaagcagattatattcgagatgggacgattgattttcaagaccaaatgacttggttcaaagaagaagttctagcggaaaaaacgattttcgcagaatgattgttggaattgggaaaaatacttgtcacgtaaagaataaggtcatcttttgagagataaaaaaaggggatcttaattttccaggtaatcaaagggaaaattggggtaagcaaaactttctttgattctatactttcccttgctgtattattatttatacgcatatttagtctatagttaaaaaatagcattattaacaattaaaaacaagttacgattttgtcatctatctattttaaagtgaacatatgggtatagctcaaaaataaaaagccaactgcaatgcttgtttatcagcaagtgcagtcggcttaaaatgaattattttgtttcacggtgtaaagtaacttttctttcacgtgggcaatattttttcttttccaaacgatcaggattgttacgtttgtttttgtttgttaagtagttgcgttctttacaagaagtgcactctaatgtgatgtttacgcgcatgtttttccctcccatatattcaagaatcctctaagatttctctcagactaaaatataatagcatgtttggcaaaggaatgctagtagtttaatgaaatttgttaagtaattttacttgacgattttttgaatgaaatcaaccattttcatccaatttatttttcacgtcttcgatcatttttgtataagcaatcggtccgttatacagccagctggattcaggtccaaactcccaaagatttccttctttgaccgctttaagattttgccaaacttggtctttaaaaaagtcggctccttgatcgctgtttactagaatcaggtaatcagcatctaattcagctaatttctccaaagaaacggcagaccagtcagctgtcgctgttttgctgatcttagaaacaagtggcggtacagagaatcctagttcatgatagaggagctgaccgctggaacgatcgtcagcaaccataaaagcagaattgttggtgacccagagaacagccaccgacttcccattgattttacctgaaaattcttgcttagttgtttttactaagtcatcatagtctttttctactgtttttgcttgatcttctttatgaagaacttttgcgatatctgtcaaacggtctcgccaagagacattttcaccatttttgactacataagtaggggcaattttgctgtattgtgcatatttatccccttcaaccatcgtattgctgtcgatcagcaacaagtctggttcataacttaagacgtcctcatagggcaagtcgtagctgatccttggtacatcacttagtttctcttgcaaatagccttgatcactgttattaccaacagtccattgtgctactggtgtgacgttcaaggctactaagtaatcttctaaataactgccgatgattcgctttggatcatccgggattgttacttcatgtccagccgcatctttcagcgttgccgtctcagctgaggaagatgacttggtattattggaattagctgaacaagcactcaatgctgttaagctgactagggtacaagacagccaaaaaagtgtttttatggttcgttttttcattaggttcctccttataggataaatgagaatcattctcactttctttttgtcattatcacgaagaaaaagtgatttgtcaatccctggttttttgctttgaagcattgacggatagaaggaaaaccgtcataattgataatcattatcaatagaattttgagggaaagatatggcaaacttacgcacggtcgatttgactgtcggctatcaaaaacaaaaaattgtgcaaaagataacaatcgacatcccagaagggaagatcattggtttgattggacctaatggtagtggcaagtcgacttttctaaaagcattagcccgaatcctgctaccaatggaaggggaagtttatctaaatgaacagaatctacaaacgatcaaaacgaaggaagtcgcaagccagattgctttgttgtcacaagtcagtgattcttccatcggattaaccattcgagagatcgtttcttatggtcgttttccttatcaaaaagggctaggtcggttgaccgcaaaagattatcaagccattgaatgggcattagctgcgacagatttgaccgaactagcggatgctggtatccatacgctttcaggaggtcagaaacagcgggtttggatcgctatggctttggcacaagatacagagattgttatcttagatgaaccgacgacttttttagatccggcacatcaactagaagtgctgttattgttaaagcgaatcaatgaaaaatatgggaaaacgatcattatgtcgattcacgatctgaatcatgcatctcgattttctgattatatttttgccttaaaagaaggtcaattaatgacttgggggacaccagaagaagttttgacccattcatggctccaacaattgttcgctatcgaagctgttttaggtacgtttcccaatagttcgaaaccgttgcttttgacctatgaattaggagccaacacatgaaaaaatttacgattcttttgcttgttctaagcggattattggtcgctgtgttttttctggcattgacgcaaggggcagctgatattcccttaataactattaaagaggccttttacgcatttgatccagaaaatcaaacccatcaagtgcttagaaatatccgtttgccgcggatctgtgcttcgtttattgttggcagcagttttgctgtaactggtgccatcatgcaaggagtcaccaaaaattcgctagcagatagcggtttactaggaatcaatagtggggctgcagtcggattagccgttgcatttatcttgtttccctcactacaaccgaatcaggcagcgttgttttctttcttaggcgcttttctagctacttcttttttatttttgttgacgaagtattcaaggatcggtatgacgccgactggattgattctagcaggtgttgcattgagttcttttttttctgcgattagtcaagtattatctttacaatttgatttgaatcaagacttggccttttggtttattggcggtgcagcaaatgtaacgtggacacaattacaagtgatcacccctatttatctggtggcgctcttcatcatcctaggactcgggaaatctttgaatttgctggctatgggagatgagacggcaatctctttaggcaaacatcctgaacggattcgacttgtttctttagccgtagttgttctattagctgggatggctgtttcactggtgggaccggtcagctttattggattgatggtccctcatgtgattcgcggactgattggcaaaaattatcaaatgatcttacctttgacgatagtggcggggggaatattggtaatcttagcagattgggtaggacgaatcattcagccaccttttgaaacgccttttggaatcatgatggctttgattggggttcctttcttattagtgaagattcggagggaacagctatgaagaaaaaaatcggtttcctttttgttttggttcttctggcgttttgtggcagtatcatggtgggaaagacgttcttttcttttgatctctggctcgctctttggcagcaaactctaacagctagccagtcattgatattcttcgatttccgacttcctcgagcagtactggcactgattgctggaagtgcgtttggcttctcaggttttttgttacagggagtaaccagaaatgagttggcggatgcaagtattttaggaatcaataatggagctggcttatgtgtcatgctctacttaggcttttatgcccagggctcccagctgttaccactaattggtatgattggcggactattagctgcactgctagtctatgctatcgcttataaacagcggcagctgctttcaatggagcgaattttattatctggaattgctgttaatgctggacttgcttctgcgtcgttattattgactgttcaattgtcaaaagaacgatatagttttgttacggcatggctttcggggactatctggggaacttcgtggacgcaagtactaagtttgttgccttggttcttgattctaggattgttggcattcatgattacacctttgatcaatttactgggttttggagaagaacaggcgatcagtttaggtgttcccctaaatcttttgcgcaccggtttgttgttcgtagcgattggcctggccgcaagcagtgttggctatactggaaacttatcttttattggtttattggcgccccatatcgctaaacgattgattggcaaagaatctcgttgggcattgatagcagcgggaatgattggtgctattttggtgctagtcagcgacacagtcggccgtcttttacttcaaagtggcgaaattcctgctggtatcgtgattgcgatcattggtgctccgtactttttgtttttgctgattcgtcaaaaaacgtagtcgtgagaattttttcacgattgcgtttgctatttgagtccggtttttggtactattcggagtaggagttggttaattatggataaaaaaattttgcgtgaacaagggctaacccgactcaagcaactggatccacgaacaaagcaaaccaaagagcagatcattcagtctttgttgtttgcttccgaagagtggctcgaagcagaatccattggcgtgattcggtcattgccgtttgaatttgatacaaagccgatttttgagcgcggatttcactctggcaaacaaattgccgtgccacgttctgtgagaaagaaacttcacttttatcaagtggaaccacagactgaatatcagctttccagttttggggtagaagagcctctttctcaaaaaaaaatcgatgcattggacctggatcttttgatcgttcctggtttgattttttctcatgagggatatcggattgggtttggcggcggttattatgatcggtttctggcagatttccaagggaaaactgtgtcattggtttttgcagaacaatttgatgtccggtggcaacctgattcttttgatattccggtccagaaaataatcactgataaagtttctttcggagaaaaaggagtagacaatgaataaacaaatgaaacgctggcttaatcgtccaatctttacttatacgtttttagccatccagacgttagtctttattatcggctatattagtccgatgactcaagtgatgggggtgatgtttggcccttatgttgcttacatgaacgagtattggcgttttgtaacgccgattttcattcactttggtctcgctcattttgcagtgaattctgttattctttattttatgggtcaacaggtggaagcgatctacggtcatgctcgtttcttcattttgtatttgatgagtggggttatggggaacgcgatgagttttgcctttaatcaggccggtgtccaatctgcaggtgcgagcacgtcattgtttggtctgtttggtgcttttctgattctgggactccactttaagaatgattaccagatccaagcgatggttcgtcaatttgcattgttcgttgtcttgaatttcgtatttggtctatttgatcaatcgattgatatttggggacatgtcggaggaatcttaggaggattcatcttaggcaatgcattggctttaccaaagaacttcgaggaatattcgattcatacccgcattctttccgccattgtttttctttttttactggcagtttttgtgatatatggtttaaaaaagtatcaaatacttgtataataagcaggaagtgtgtttatggaaacgttatatgacgtacaacaactattgaaacaatttggtgtctatatttatgttggcaagcgaatctatgatatcgagttgatccagatggaagtcaaaaatctttatgacagccgtttgatcgatcgagatacctatttgaccgcttggcgcattttaaagcgtgaacatcggattgaagaaagccgggaggaaaataagtgatggacaaaaaaatcatcgggattgatctaggaggaacaacagtcaagtttgctgtgttgacttctgaaggagagattcaacaaaaatggagcatcgataccaatattcttgatgagggttcccacatcgtaccagagatcattgcatcaatcaatcatcgtctggatttgtatggcatgaaagcagaagacttcattgggatcggtatggggactccaggaagtgtcgatcgcaaaaaaggaacagttatcggtgcttacaatttgaattggaaaacgttgcaacctgtcaaagaagcgattgaaaaagggacagggattccttttgctatcgataacgatgccaatgttgctgcgttaggcgaacgctggaaaggcgcaggtgacaacaatcccgatgtgatctttatcaccctcggtacaggtgttggcggtggaatcatcatggaaggacaacttttgcatggtgtagcaggctgtgcaggagaaatcgggcatattactgtagatccagaaggatttgaatgtacttgtgggaagcgtggttgtttagagaccgtgtcaagtgcgacgggtgtcgttcgggtagcaagacatttggcggaagagtatgctggcgattctgaattgaaaaaaaatctggataatggcgaagatatttccagcaaagatatttttgaagcggcccaagcgaaagatccgtttgcattgatggtagtagataaagtctgcttctatttaggccttgcttgtggaaacttgggcaatacactgaatccttcaagtattgtactgggtggcggtgtctcagcagcaggtgaatttttacgtagtcgtgtagcagcttactttgcagaattcacattcccgcaagtaacggaaagcacggaaatcaaattagctgagttagggaatgatgctggtgtgatcggcgctgcgtcattagcattacaatttgcaaagtagagaggaataggtaagatgtctgtttggaactggattaatattattttaggattgattttattggcaatcgcattgaattgggcgtacttccaaattatgggaagacgatcagccaaaatcatttccgaagaagaatttaaaaatggcatgaaaaaagcacaagtgattgatgtgcgggagaaaaacgagttcgatgccggtcatatcttaggtgcacgaaatatcccatttacggtattaaccaattcgtttagcgcatttcggaaagatcagcccatctacttatatgatacccgtaaatctctaagtatccgtgctgcgaataaacttcgcaaagaagggtttaaagaaatttacattctaaaagaaggctatgaaggctggagcggaaaaacgaaaaagaaaactagttaatcaatcaaaagactgagatcaatgatcaaacaagatgttcctaagaggcgcgagaatgaatcgttagaaaccattcagcagctgtaactgagaatcttgtcatcatggactcggtcttttttttttgaaagaatgtgttaaggtagattcaaaggagtggaaggaaatgattaaagtaaaacgtgtatacgaggctgcagcacccacagatggttatcgggtccttgttgatcgaatctggccaagaggcgtcaaaaaagaagtggcggcgattgattcttggttgaaagaggttgcacctagtacggaattgcgtaaatggtttggtcatgatccagagcgctttgatgcgttttgtcaaagatacctagcagaactaaaaaagaagccagccgatgatgcctttagtgcattgcagcaaatagtaaaagaccataaaaccgtgacattggtttatggtgcaaaagatgaaacacataatcaagcggttgtattagctgaagaattgaaaaaactgccattgaagtaaaatcttcaatggcagtttttgtattaacgagagacacttttacgcatagctcgttttcttttttcttcatttagtgcttgttgttcgtcaattggatcgatcacttgttttttgacagtcatgactacgctagcagctgctgcgatagttgctactgtaccaactaagaaacctgaaagaaatcgtttcattcttctccacctcgcctttatctatttatttctattatgaaacaaaagtacaaaaatatcaaaaataagcccttgtatcgcgagtaaaggattgataaaatttagtaaatattttataataaatttactaaatgaaatgaaggagcgaaaaagatggaacagctacaacaaatttttgcagaaaaattcggtgaaaaaggcacaggatcgtattttgcaccaggacgaatcaacttgatcggggaacatacagattataatggcgggtatgtctttccagcctctatcacgataggaacgtatggtgtagcacgaaaacgggcagataagcaaatacgtctttattcggaaaacttccctgaaaaggggatcatcactttttccttagacgatttggagtaccgcaaagaagacgactggaccaattatcctaaaggtgtgattcgctatttgaaagcagcgggtcatgcaatcgactctggtattgaaatcgctttttatggcaatattcctaatggtgccggcttgtcttcttcagcctccattgaattattgacaggagtgattcttgatgatttgttcggattggcgatcgaacgtttagagttgattttgacagggaaaaaagttgagaatgaatttattggggttaattcaggtatcatggatcaatttgctataggaatgggaaaaaaagaccatgcattactgctagataccaacactttagcttatgaccttgtacctgcagaatttggggactatgtcgtagctatcatgaatacaaacaagcggcgggaattggcagattcaaaatacaacgagcgccgtggggagtgtgaagaagcattaaaacgacttcaaacgaaactgaaaatccaatcgcttggtgaattggacgaagcaacattctttgcacatacttcactgattgaagatccaaccttgatcaagcgcgcaaaacatgctgtaactgagaatcagcgtaccttaaaagctaaagcggcattagaagcgggagatttagaatcttttggtcatctgttagatgcttctcatgcttctttaagagatgattatgaagttacgggtatcgagttagacactttggtggcagcggcacaagaacagccagcagttttgggagcccgaatgacaggggctggatttggtggttgtgcaatcgctttggtgaaaaaaagcgagtgggaagcttttgcaacggctgtcaaagaaagctatcgtgaaaaaatcggctatgagacagatatttaccaagcaagcattgatgatggcgcgcgaaaactgtagaatgtaagacggattcattgaataaatgaaagaaaaggatgattaagaatggctattttagtattaggtggcgccggatatatcggctctcatgcagttgatcaattgattacgaaaggataccaagccgttgtcgtggataaccttttaacaggtcatcgtcaagcgatccatccagaggctgttttctacgaaggagatattcgagacaaagcatttttgcaaagcgtttttgagaaagaaacgattgatggcgtgatccattttgccgcaagctctcttgtcggtgaatcagttgagaaaccgttgaaatacttcaacaacaatgtgtatgggatgcaggtattattagaagtaatgaaagacaacaacgttgatcatattgtcttttcttctactgcagcgacttatggcgagccagaacaaagcccaatcacagaagaaacacctacaaatcccaaaaatccttatggggaaagcaaactcatgatggaaaaaatgatgcgttggtgtgatgaagcttacggcatgaaatacgtcgctttacgctactttaatgttgcaggagctaaatcagatgcttcaatcggggaagaccatgatcctgagactcatttagttccactcatcttgcaagtcgctttaggtcagcgtcaggagctagcaattttcggtgatgactatgatacgccagatggaacttgtatcagagactacgtacacgtagaagatctatgcaacgcccacattttagcattagaatatttgaaaaaaggcaatcctagcaatgttttcaatcttggcagcaacaatggctactcagtcaaagaaatgttggatgccgcgcgtactgttacgcaaaaagatattccagcgaaagtagcaccgcgacgtgccggagatccgggaacattggtcgcttctagtgataaagcaaaagcggtgttaggttgggaacctagttacaccgatgtgaaacaaataattgaaacagcttggaattggcacgttagccatccagaaggttatcaagactaggaggcaacaaaatgacgctcagtcaaacaatctgtgatttcgtgacattagcgatccaggctggtggttggatggaaatggatcgtatttatttacaaaataggatccttggtatgattggtgaagaagactttgaatcagctactgtacgaccggtcgaagaatcagccgtggtattgatggatcaattggtcactcaagcaaaaaaaaatcaggtgatcggcgaggcacttgctgataccgaaatccttgaagcgcaattgatggatttcttgacgccaccgccttctgtggtcaatgctttctttgcccagcactatgcaaaagacccacaagaggcaacggattatttttaccatttgtgtcagcaaaatgattacatcaagactcgagccatcaagaaaaatattgtttttccggtaatgaccgagtatggagaattagagatcacgatcaatctatccaaacccgaaaaagatccgaaagaaatcgctgcgcagcgagcagcagcagcgatcgattatcctaaatgtctcctttgtttggaaaatgaaggttataaagggcggctgaattacccggctcgaacaaatcatcgcattattcggatgaatctggacggcgaagcgtgggggcttcagtactctccgtatgcttattacaatgagcattccatctttttgtctttagagcatcgtccgatgaagatcacgcgcaaaacctttgatcgtctattgcaaatcattgaggttctgcctcactattttgtcggttcaaatgctgatttgccaatcgtaggtggatcgatcttgtcccacgatcattatcaaggtggacggcatacatttgcgatggcaaaagcacccattgagaaaacattcaaactaactggttttgacgagctaacggtgggaatcgttaaatggccgctttcggttattcggattcaaggtcgagacaagcaaaaagtggctgctgcttctgattatattttggcacaatggaaagagtactcagatccttccgtttcgatcaatgcttattcagaagatggcacaccgcaccacaccatcacaccaattgctcgaaaacagggcgaatactttgaaatggatcttgttcttcgggataacaatgtttctgacgaacatcctgatggtatttttcatcctcataaagatgttcagcatatcaaaaaagaaaacattgggttaatcgaggtgatgggattagcggtcttgcctccacgtttagcaacggagttagaagaagtgagggcctatcttcttgatcagccaaatcaaattgctgcttatcatattccgtgggcacaagagatgaaggaaacctacaccatcactgaggagaatgtaacagagattgtttatcaagaagttggtgggatttttgcaaaagttttggaatacgcaggagttttcaagcgagatgcatccggtcaggctgcattcatgcgttttatcaataaactttgaagttattgagatgactttgaaagaatggaggcgcgggaatggctacaattaaagatattgctgaacaggcaggcgtttcaccagcgactgtttctcgtgtcctcaattatgacagtgagttagccgtcagttcagaaaccaaagaaaaaatattcaaaaccgccgaagcactgaactatacaaagcataaaaagaaaagccaagtcgaaaacggtcggattcgtttgattcagtggtttgataccgaagaagaactggccgatctttactatttagctattcggcttgggattgagaacaagacggaagaattggggattcgcttgttaaaagaatcgtttgcttctatcagtgagacccaagtagatggaacgattgctttaggaaaatttgatgcccagcagatcgcacaattaaaaaagacgcagcctcatctgctactcgttgattttgacgggctgtcggctggagtggattcattggtagtcgattttcagcaagcagtggatttggtcattgatcattttgttgctaaaggacatcaaaaaatcggtatcttatctggtattgaatttacaaaaggaagtcgacaagaaattgaagatccgcggctgacgctattcaaggaacgactgacacgcttgcgtctttatgacgaagggtatcacattgcagcagcgtttactgtcgaagatggatatcaggcaatgaaacagttcttgcaagacgccttgccactgcctactgcgttatttgcttccagcgatgctttagccatcggagcactgcgggcactgcaggaagaaaagattcgtgtgccagaagatatctccttgatcggctttaacgatgtcagtgttgccaagtatgtttttccaaccctttcgacaatcaaagttcatacggagtggatgggagagttggctgtaaccacactacttgagatcatcaagaatccagctcctgttccgcgaaaggtcaccatcgcaacggagttgattaaacgtcaatctacgaatcaatgatggggaagttcatctgcaacaaatagaaatgtcctgagaatctatgggaaaaagtctccagtaatggaacagttttccgtcgcagtcagaaactgtcgcggctgccatagattctttggccatttttttagttcaccagtaaccatgcacctatgaaagcaaataagcaaagtttggcattttatcagaatatggtaaaatatgagtgagttttttgattggggagaaaaagcaatgaaaacattagcgatcgatacatcaaatcaaacattggccattgcagtcatggatggtcaggagatcctaggacaaagtcagacgatggctatcaaaaatcacagcagtgcattgatgccggcaatcgatttattgatgcaatctgtgggggtattgccgcagcagttagagcgaatcgcagttgcccaaggtccgggatcttatacaggattgcggatcggtgtcacgaccgctaaaacattagccgatacattacatatcccattggtgggcgtgtcgagtttgaagaacatagctgcgaattgtgttggggttttgaaagtgatcgtgccattatttgacgcacgtcgcaacaatgtctatgctggtggctatcgttggcaggaaggggagctgcagtcagtgatccctgaccagcatgtggcattaccgacattgttgcatgcactagctgagttgcacacagaggtactttttgttggcgctgatgctgcaaaatttgccccgcaaatcactgaagccatgccgtctgcacagatcaatcacgtttctttgtggaattatccgaatggcgtcgtgttggcagaattaagtgaaacagaggaacccgtttcgtcgatccatgattttgtgccagagtatttgaaacttgttgaagcggaagaaaagtggttggcatctcatactccaggagcggatacgtatgttgaaaaaatttaaatctttcaaaggaaagctgcccctttttcgtaaagttcaatacccagaacagacgaaaacgattcaggatgaaacgtatgtgattcgtgaaatcgtcggcgaagatatcaaagagttactgcaagtggaacgattggtgtatgccggcgagctgccttggaccaagagcgcgtttctttcagagatttattcgcgatttaagcatttgtacttgtgtatcttacaaaatgagcgcatgatcggttttgcgggcgttcgtttgttgggagaagatgctcatattaccaatattgctgttatacctgaatatcaaggccgaggtgtcggctcttttttgttgactgaaatcgaacagtatgcgcgaaaaaacaaatgtgaccgaatttcgttagaagtgcgtttaagtaatcgtgacgctcagcgactttatcgacagctgggctttgtctcgcgagcgatcaaaactgcctactatacagaaggaaatgaagatgcattggatatggtgaaatttttaaatgaataaactgttgaataaagaagaattgcctgcaaaaagtgaagagctgttatggcaattggcagaagcgagttaccaagatggctctccctggacttgtgaacaattcaagcaggatttggctgctgttgacagtcactatttagtactccagccaatggaggcatttgttagttaccgtcgggttttagatgaagctgaaatctttaatctcgcagtcttaccggaaaaaaaaggacagggattggggaaactcttgctgcaagctgttattcagtcttgtcaatctgctggcgtcgaaaggatttttctagaagtgcgggtccgtaattttccagcacaagccttatacctgcgaatgggttttgaaatcattgggcggcgcaaaaattattatagtcatcctcaagaggatgcattgatcatggaaaagaaagtgaggccagcatcaatcaaatgaatgaattgattttagccattgaaagcagctgcgacgaaacaagtgtcgctgtcataaagaacggggacacgattttaagcaatatcgtggcttctcaaattaaaagtcatcaacgttttggtggcgttgtcccagaagtagctagtcgacatcatgtggagcagattactctttgtttagaagaggcactgaaacaagcagaagtgacaccagaagacttatccgctgtagcggtcacgtacggtccaggcttagtgggggcgttgctgatcggtctttcggcagccaaagcgtttgcctgggcgcatggattacccttgttgccagtcaatcatatggcggggcatatctatgcggcccgttttgtcaaacctctgacctttccattgcttgccttgctagtgagcggtggacatacggagttagtttatatgacagaagatggttcctttgagattattggcgagacacgtgacgatgctgcaggagaagcatatgacaaggtaggacgagtcttaggactttcttatcctagcggaaaagaaatcgatcgtttggcgcatttaggtgaggacacgtaccattttcccagagcaatgattcatgaagacaattttgattttagttttagcggattaaagagtgcctttattaattttgtccataatgcgcagcaacgaggagaaacattggacgaagccaaccttgctgctagttttcaagcaagtgtcgtagaagttttggtcactaagacgattcgcgcctgcaagacttatcctgttaaccaattgattgttgcaggtggcgttgctgcaaaccaaggcctgcgtcaggcactagatgaagcaatgagtgacctgcctgagattgacttgattattccacctttgcgtttatgtggcgataatgcggcaatgatcggggcctttgggcatattttgttagaaaaaaaacagtttgccccactatctttgaatgctgtgccaagcctaagttttggtcatgaaatgaaataatcaagcatttgctgctcaacattacagagaagaccgtggcgtcatcgggatacgaatccgaatggcagcccacggtcttttgtttaattatttggataaaattgattaaaaatacgtaaaacttgtatatattgaataaaaattataaaagatgtatactggctaaaaaacataggcaagaaagggtgcaaaagaaatgaaatccgtttttaaaggtcgcagttttttagcagaaaaagattttaccagagatgaattgcagtatctgatcgatttttcattacatgtaaaagaattaaagcaaaagaatatcccgcatcgttatttggaaggaaaaaatgtcgctcttttgtttgaaaaaaattctactcggacacgagctgcctttaccgttgctgccgttgatctaggagcgcatccggaatttttaggagcaaacgatatccagatgggatcaaaagaatctgttgaggactctgcaaaagtatttggtcggatgtttgatgggatcgaatatcgaggatttagccaaagaatcgttgaagacttggcgaaatattctggtgtacctgtctggaatggattgtctgacatgtggcacccgacacagatgatcgcagactttatgacgattcaagaaaattttggcagtcttgaaggtctgacgatcgcttactgcggcgatggaagaaataacgttgcgcaatccttacttgtgactagcaggattctcggtgttgctattcgaatcatcgcaccaaaagaattacagccggaacagcaagtcatcgagctggcagagcaatttgcccaagcatcacaagccgaaattttgattacagatgatgtggcagctgtagcaggagcagacgttgtttataccgatgtatgggtttcaatgggagaagaagcaaaatttaaagaacgaatcgacttgctgatgccttaccaagtaaatgccgaattaatgaaaaaaaccaataatgaacaagccattttcctccattgtttaccagcttttcatgatacacaaaccaaatatggggccaaaatcgctgctgattttggcttgaaggagatggaagtgacgaatgacgtttttcacagcaagcaagcgcgccagttcgatcaagcagaaaatcgccttcactctatcaaagccattatggctgtcacccttggagatctatttattccaaaggtttaactagcgaaatccatgcaaaggcgaaaaaccggctagccaaaccgattattttttgttatactttctgggaacaaaatagtagataatcgatgagcaagaagagtagcttttgtttttcagcgagttcgggaaggtgtgagccgaacaatcaagaaagtgaagcgcacttgtgagattttgcctagcaaacggaattctgccgttatcagaaataagtaggtcttttaagaatcattccttaaaggacaaatagagtggtaccgcgggaaatctcgtctctagtgcatgtgatgcactagagactttttttagttgttccgcatgtacattcgctgggcattgctttcgtatcgaaacaaatggagggaaagaaaatgaataataaacaaatcgttgcacaagctatttatgccgctgtcaaagaagatttgactttagaacaagtcagtcaattgttagaaaatcctaaaactgctgaacacggagacgttgcttttcctgcctttgctttagccaaagtctatcgcaaagcaccgcaacagatcgctagcgagctggcggaaaaaattgatccagcttcttttgaaaaaatcgaagtcgtgggtccatacttgaacttttttatgaataaagaagtgatcagcgaacacgtcttacaaaccgtcttgaaggaaaaaaatcattatggagatcaatcaattggcaatcagcaggcggttccgattgatatgtcttcaccaaacattgcgaaaccaatctccatgggccatttgcgttcgacggtgatcggtaattcgattggctttattcttgaaaaaatcggttatcagccaattcggatcaatcatttaggagactggggaactcaatttgggaaattgatcgtcgcctataaaaaatggggttctgaagaagcagttaaaaaagaaccaatcaatgaactcttgcgtttatatgttgaattccatgaacaagcagaaaatgataaagcgttggaagatgaagctcgggcatggttcaagaagctagaagacggtgatcaagaagcaaccgaattatggcaatggttccgcgatgagtcattgcaagagttcaacaaaatctatgacatgctggaagtaagttttgattcattgaatggggaagccttctacaatgataaaatgacggaagtcgttgaacttttggaagaaaaacatttattacaagaagatcaaggcgcagaaatcgttgatttgactgcctatgatctcaatccagcgttgatccgcaaatctgacggcgcaacattatatatcactcgggatatggcggcagcattgtaccgcaaacggacttataactttgctaagtctctgtatgttgtcggtaacgaacaaagctatcattttaagcaattgaaagcagttcttaaagaaatgggcttcgattggtcagatgatatgcaccacatcccatttggtttgatcaccaaagatggtaagaagctgtctactcgtaaaggaaaaatcgttttattagaagaagtattgaatgaagccatcgaatctgcgaaagaacaaatcacagaaaaaaatccaggcttagcgaacaaagatgaagtggcaaaacaagtgggtgtcggtgcggtcgtctttcatgatttaaaaaatgatcgcctgaacaacttcgatttcacattggaagaagtcgttcgttttgaaggagaaaccggaccttatgtccaatattctcatgcacgggcgatgagcattttagaaaaagcacaatttgatcctgccaatgcgcaagctcttgctttgaatgatgcagagagctgggaagtgatcaagttgatccaacgctacccagaaactatcttacaggctgcagataaatatgagccatcagtgattgctaaacatgcgatcaaattagcgcaagccttcaataaatactatgcaaatgtcaagattttagcagaagatgcgcaaaaagatgctcgattggcattggtttacgctgtaacagtcttgttaaaagaagatttgcgtctgttaggattacatgcacctgataaaatgtaaataaaaaaaaagataccaacggcagcctatatgcttgccactggtatctttttttcgattctttagagaatagcatgggacttgatatattcagtcagcttgatggcatcttcatttgtacgggaaataacggctactgtatcaaagccggcgagagaacaaactttctcaggcatcgaaacttcatctaaagccgctgccaataaaggtgcattgtcagggatcgtattgattagcgtcataaattgaacacgatccactttggtgacgacatcttccagcatgtgaatcagccgttgttcttccgctttttcattttcttgagtattcattccttgaaagagaacaaattttgtttgtccagtctcatcaggctgtttgacaatttttagatcacggatatcgcgggagatcgttgcctgcgtagcggttactccttgtgcttcgagcaactgcaacagttcttcttgagttcccacactatgttctgcaataatctgtttgatcaataaatgccggtcggatttacgcataaatagactcctttaattgaattcttcagcattatcatagcagaaaaaggattaaaaacctaggctttagtcagactgaacacccgttgtttgtaagaaaaaaatgtaaaagtaaacagctaggtttatgaggaaaagcagttgcaattctttagtagctactgtatactgtttaaggcgtgagttttttgactccgcaaatccacatcttgttccatctgcgaagcggtgctgataatcagttcttcgaagagctaaagagcaagagaggaaatcaaaaaccaaattggaggaaacacatcatggcagtaatctcaatgaaacaattgctagaagccggcgtacactttggacaccaaacacgtcgctggaacccaaaaatgaagaaatatatcttcacagaaagaaacggtatctacatcatcgacttacaaaaaactgttaagttagtagatgcagcatacgactacatgaaaaacgttgctgaagaaggcggagttgctttgttcgtaggaacaaaaaaacaagctcaagaagcaatcaaagaagaagcaatccgttcaggtcaatactacgtaaaccatcgttggttaggtggaacattgacgaactgggaaactatccaaaaacgtgttgctcgcttgaaacaaatcaacaaaatggaagaagatggcacatttgatgtccttcctaaaaaagaagtcgttggtttgaacaaagaacgcgaacgtcttgaaaaattcttaggcggtatcgctgatatgccaagaattccagatgtaatgtacgttgttgacccacgcaaagaacgcattgcgatccaagaagcacgtaaattaaatatcccaatcgtagcgatggttgatacaaactgtgatccagatgagatcgacgtagttatcccatcaaacgacgatgcgattcgtgccgttaaattgatcactgctaaaatggcagatgcatttatcgaaggcaaccaaggcgaagaccaagtagttgaagaagatttttctgctgaatcaacagaaaatgctacttcaatcgaagaaatcgttgatgttgtcgaaggcgacaatgtatcagctgaataagaaatgatggagctgtttcaaaggctaggcgccaagcctcactctcctttgaaacagcttttttaaaaggcaagttcaggcttgttaaatgacatttaggaggaaaacaaaaaatggcagaagtaacagctaaattagtaaaagaattgcgcgacatgactggtgtaggtatgatggatgcaaaacgtgccttagttgaagtcgaaggagatatcgaaaaagccgttgatctattacgtgaaaaaggaatggctaaagctgcaaagaaaaatgatcggattgctgctgaaggattggcatctgttgctatcaacgggaatgctgctgcaatcgttgaagtaaactctgaaacagacttcgtttctaaaaacgaaatgttccaagatttagttaaagaaatcgcagaagtaatcgctgcaaacaaacctgctgacatggaagctgctttgcagttggaaacatcaaaaggtaaaatggaagcagcattgatcgaagcaactcaagttatcggtgaaaaaatcagcttccgtcgttttgaagttgttgaaaaagatgacaactctgctttcggtggctacttgcacatgggcggacgtatcgctgtcttgactgttcttgaaggaacaacagacgaatcagttgcaaaagatgtcgctatgcacgttgctgcaatcaatcctcgctatgtgaatgaatctcaaatctcacaagaagaattggatcacgaaaaacaagttttgactgaacaagcattgaacgaaggcaaaccagccaacatcgttgaaaaaatggttgaaggccgtttgaaaaaattcaaagcagaaatcgctttggttgaccaaccattcgttaaagatcctgacatgactgttgaaaaatttgttgcttcaaaaggcgcaacagtgaaatcatttgttcgttttgaagtcggcgaaggtatcgaaaaacgcgaagataactttgtagaagaagttatgagccaagtcaaaaaataattctgttcctcgaacagatgggaacgcatggaagtgcgctccctttttttaagcaaaaaccgattttcaaaaaaattgcacaaattcaaacagaatggcgccaatatgctacaatagtattggagaatgtacggaggaatcatcatgggtaaaccaaaatatcaacgtgttgtgttaaaattgagcggcgaagcattggcaggggatgaaggatttggtatcaaaccgccaacgatccaagaaatcgtcaaagagatcaaagaagtccatgaacttggtgttgaaatggcgatcgtagtaggcggtggtaacatttggcgtggtcagattggtgcacaaatgggcatggaacgagcgcaagcagactatatgggaatgttggcaacggtcatgaatgcattggcgttgcaagacactcttgagaacgctggcgtaccgactcgcgtccaaacatcgatcgaaatgcgccaaatcgcagaaccttatattcgccgtcgggcagaacgtcatctagaaaaagggcgtgtagtgatctttgctggcggcacagggaatccttatttctcaacagatactacggctgccttaagagcagctgaaatcaatgcagatgtgatcttgatggcaaaaaataacgtcgatggtgtctactcagcagatccaaaaatcgatcaaagtgcagtgaagtttgaagagcttacgcatctagaagtgatttcgaaaggattgcaagtcatggattccactgcaagctcattaagcatggataatgatattccgttagttgtctttaatttaaatgaacaaggaaatattcgccgtgcaatcttaggagaacatattggaacgacagtaagggggaaatagaatggctgacaaaattttaacagaagcaaaagataaaatgaaaaaagcagcagaaaacttgcagcgcgagttaggacaaattcgtgctggccgtgcgaacgcaagtattttagaccgtgtgatggtaacctactatggtgttccaacaccactaaatcaaatggcatcaatcacgattcctgaagcgcgtattttgatgattacgcctttcgacaaaacaatgatccaagaagtcgaaaaagcgatcatgcaaagcgacatcggtatcacacctgctaatgatggtacagtaatccgtttagtcattccgcaattgacggaagagcgccggaaagaattggcaaaagatgtgaaaaaagaagcggagaatgcgaaaattgctgtccgtaatatccgtcgtgatgcgatggatgcttacaagaagcaagaaaaatctggcgatatcacggtcgatgatttaagagaatcagaaaaagaagttcaaacattgacagacaacagtattaaagaaatcgatcagatcgcagctgaaaaagaacaagaattattagaagtataagaagcaggggcgcacaagcgccctttttttattcctaacaaagagaaaatgtttttgtttttctttaatatagatttctttttttacttttcataggcaagaaatatgattattgttataatgaaaaagatgaattttacgaaatggaagaggagcgaatcatatgttgcgtttttttccacaaaaagacaaatatgttaaggaagaaactgaatacgaacttgatccggcattacctgtgcctcagcatatcgcgatcattatggacggaaatggccgctgggctcagaatcggcgtttaccgcgggtggcagggcacaaagaagggatggagacagtgaagacgatcacgacccatgcctcgcggcttggagtcaaagtcttgacattgtacgcattctcaacggaaaattggaaacgaccaaatgaagaagtcgattacttgatgcaattgccagttgatttttttgacacgtttgtaccagagctgatcaaagaaaatgtgaaggtccatgtgatgggctttactgaatatttgcctgctcacactcaagatgctgtcaatcgtgccatcgaacagaccaaggagaatacaggaatggtcctgaatttcgctttgaactatggcagtcgtgctgaaatgctgcaggcgatccaaaagctgtatgaagaactagaccacacacaggagacggtggaaatcaccgaagaaatgatggaccagcatctcatgactggtttcttgcctgctgcacttcgcgatcctgaattggtgattcgaacgagtggtgaagaacggatcagtaattttcttctttggcaaattgcttatagcgagctctttttcactaaagcattatggcctgactttgatgcccaattgttagaagctgccatcggcagttttcaacagcgaaatcggcgctttggcgggttgaacaagaaggaggacaaaaagtgaaacaacgtgtgatcaccgcagtggtggcattagcattttttttaccagttatttatgtcggtggaatagccatcgagttgacggcagctttacttgccggaattggtgtgtttgaattatttcggatgaaaggactagcggttctcagttttgaaggggtgttatcgattcttggggctgtgatcttagtcttacctaaagatccttggtttgctttcttaccagcaaatacagataaaagtgctttgttttatctgattgtcttgttgttgctagggatcgctgtcgtttccaaaaatatgtacaccattgatgaagcaggtttccccgttttagtcagtctgtatgtgggtgtcggctttgaacgtttcttgacggctagattagtaccaaacggattagttgtgctgatttttggcttgtttattgtttgggcgacagatattggtgcttatatggttggccgccgattcggcgcacataagctatggccggagatctcaccgaacaagaccgttgaaggggcattgggcggaattgtttcggcagtcgttgtggcagctctttatttgttggcattcccaggcaacgattactttggccatggaagtctgatcatgatcgtattgacgattattttttcgattgctggtcagtttggtgaccttgtcgaatcagctatcaagcgacactacggagtaaaagattcaggcaatattttgcctggccacggcgggattcttgatcgttttgatagtatgctgtttgtttttccaatcatgtacttattaggtgttttctaaagcaatcatttagttagtctagataaacgagcaataatcacttgcttgactagataagtgctaggtcattaatttgtttgatcagctccgcagaaagaagacaatttttaacctcattttaaccttatttcaacctctaaatgaagcctgttttcacgggaccagacatttagaggttttttagttctcgactacttggcggtcgaagcttttttgacggacccctgtgaagaatgcgaggataaggaaaaaagaacactcttcctgttaaggaatgtgttgagagaaagagccacagtctttttatgcgtgttagagcttggttctttaaattcttgttacaataacgccggaagttcctcattaggtgtgggtgtgataaaataaagaaaggtttcccctttagcaagagggaacagtgaaagcgaggaaacagaatgaaaacgattcttgtgtttattatcatattttctgttgtggtcgtaatccacgaatttggacactacttctttgccaaacgtgcagggattttagttcgggaatttgccattggaatgggtccaaagctttttgcccatcaaggaaaagatggaacgacttacacgattcgaatgttaccattaggtggctatgttcaaatggcaggctggggcgaagatgagacagagctgacaccaggtatgccgatctcacttgtgcaagacaaggatggaaaagtcatcaagatcaatactagcaaaaaggtgcagttgcctcatgcgattccgatggaagtggtagactttgatctcgaagaaaagttgacgattgcagggtacatcaatggaaatgaacaagaaaaagtcgcttatgcggtcgatcatgatgcaactattattcatgaagacggtgtggaagtaaggattgcaccgaaagatgttcaatttcagtcagcgaaactttggcagcgaatgttgaccaattttgctggaccgatgaataacttcatcttagcttttgttttattcacagggttagtgtttgcacagggtggtgtacaagatgtgaatacgaccagcatctctggtatccaaaatggttcaccagccgctgaggcaggcttgaaagatggcgatgagatcttagcagtcaatggcaagacagtatccaactggcaggaattgagcagtgagatccaaaattatcctgacacgaagatcccccttgaagtgaagcggggaagtgatacattaacgattgaagcaacgccagaagggaaatatgctgaaggagaaaaagtaggatttatgggaatcagtcctggcttgaaaacaagtcttggtgacaagctattaggtggcttgaaattgaccttcaacaatgctttactgattttccgagctgtcggtaatttgatcgtacaaccagatctggacaaattaggcggtccggtggccattttccaattgtcctcacaagcagcctcacaaggggtagcttctgtcgtcatgatgatggcggcgatctccatcaacttaggaatcttcaatttgttgcctattccaggattggatggcggcaaactcgttttgaacattcttgaaggtgtccgaggtaaaccgatcagtcaagaaaaagaaggaatcatcacgttaattgggtttggttttttgatgttgctgatggtgttagtgacttggaatgatattcagcgctttttcttttgattagaggaagcagctgatatgggccaagcagggtgtatggtatagcaaagtgtttgcagcaaaggagaaaaaaatgaagcagtcgaaactgtttattccgacattgcgggaaataccaagtgatgcggaaacattgagtcatcaacttttagttagagccggttatattcggcaagtggcagcaggcatctacatgtatttgcctttagcccagcgggtgttggagaaaattaaaaaattgatgcgggaagaattagccaaaattgatgcagtagaaatgacgatgccagttttattgcccttggaactatggcaaagtactgggcgagacgggctttatgggcgctcactgtatcagttaacggatcgaaacgagcgggagtatgtcttggggccaacccatgaagagccttttacggaattgatcaaaagtgagatctcttcctacaaacgtctgccgatcagtttgtatcagattcagtcaaaataccgagacgaacaacgtccgcgcttcggtttgattcgcagtcgcgaattcatcatgcaagacggctactcatttcatgccgatgagtcaagtttagatacgacttatcgtcggtatgaagcagcctatcacgcgattttgcagcgttgtggtctggagtatcgcgcagtgattggtgataacggtctgatgggagggcatgattccaaagaattcatggcactgtcgcagattggtgaagaactaatttgctactcaacggaaagcgactacgtggcgaattggaaaatggccacaagtttgtatgtatcaaagaaatctcacgaaacctttcttgagcgcgcagagttgcaggttgatccatcttattctctggaagaagtagctgcagcttgtgagagtgacttgactaagatcgttcagtcctttcttttgtttgctgatggagaaccggtcatgattcttctacgtggcgatcatcaattgaacgaagcaaaagtcaaaaattttctagaagccgatcaattgaaaatagctacaccagaagaattacgttgtcatctgcaaactgaagcaatcagtcccattgcgctgccggaaaatgtccgcttatatgctgatcagcatgtacaagatttagcaaatgtgatcgtctttggaaatcaaccgggccattactatcaaaacgcaaatgtaggacgagatttttccccattggcatttgctgattttcgattggtgcaagaaggtgatccttctccagatggcaaaggggtcctaactttcacacgaggaatcgaagttggccacattttcaagctaggaaccaaatacagtgaaagacttggtgcgacagttgtcgatgagaacggtcaggagacgccagtcatgatggggtgttatggcatcggtgtatctcgtcttctatcaacaatcgttgaacagcacggcaatgaagagggaatcgattggccgaaagagattgcaccctatgatatccatattattcaaaccacaatggaagactcgtatcaaactgctttgtgcgaggaagtagagcaagcgatgcttgctgtcggttatgaagttttagtagatgatcgcaacgaacgtgctggtgtcaaatttgcggatgcggatttgataggctgtccgattcgattgaccattggcaacaaagcgacagaagggattgtcgaaataaaaatcaaacacacaaatgcaaccgttgaagttcgtaaagaggaagtggctacgacattaacgatcttgttgactgcatctgaatgatccgtgacaaaaatcgaggaagggggagccctttctcgattttttaatgaaagacaaaagaaaaagaggtatactaattaatactgagaaaaaggaggatggtcaattgtcaaaagaaagagagacctttgagattttattagagcaaatcaatgctggtcctaatttacgccaacatcctttgatacagaccgctcaaatcaaacaagtcgtggtccatcgccagtcaaaagcttggacattttacttgcagtttgatacattgctacccgttatggtgtatcaatcgttcaaacaacatttggaactggcctttaaggaaatcgctgcggtgcgaatgatcattgaagccaaggataatgccttcgatcaacaactgatccaagagtactggccattagcactcgcaaatcaaaactgtgatcgtccactagtacagcaagtcattaagaatcagctaccggtagtgaatgagaaaaaagtgatcctgcctgttaccaatgaagcggtaatcgcgattttgcagcaacaatatttaccaatcattgaagaaaactatcaaacatttggttttcaaaaatttcgtatcattcctgaaatggatgccgaacaagcagaagaagctttaaaagaattggaagctcgtaaagaagaacagactgctgctttccaattacaggctgctgagaacttgatcgcccatgaacagcggaaaaaagaagtgaaagctgttgaatttgacggtccgattgcattgggaaggaatattccagccgatgaacccgttaccccaatgattaatatcattgaggaagaacgccgtgtgacgatccaaggatatgtctttgataaagaagttcgggaattacgttcaaagcggaagatcttgattctgaaaatcacggattatacgtcatctttcagtgtcaaaaagttctccaataatgaaaaagatgaacaaatctttgaggcaatcgccaaaggcagctgggtaaaagttcgcggaagcgtgcaggaagatacctttatgcgagatcttgttatgaatgctcaagacttgattgaggtaaaacacgagattcggaaagactatgcacctgaaggagaaaaacgggtggaactccatcttcattcaaatatgagtacgatggatgccacgaataatatcagtgatttagttgcacaagctggaaaatggggacataaggcgatcgctattacggaccatggtggcgcgcaagctttcccagatgcccatcatgcgggtgaaaaagctggtgttaagattttatatggggttgaagccaatatcgttgatgatggcgttgcagtggcttataaccctaaaccagttcctttgacggatgccacgtatattgtgtttgacgtggaaacgacggggctatctgccgtttatgatacaattatcgaattagcggctgtccgcatgcataaaggcaatgtggaaggctcatttgatgaattcattgatccaggacacccattgtctcgcaccaccgtagagcttacagggatcacggatgaaatggttcgcggttctaaatcagaagaagaagtattgcgactctttagagagttttctgaaggagcaatcttggttgcccacaatgcttctttcgatatgggctttttaaatacgagttatcgaaaatatgggattccagaagccgaaaatccagttattgatacattagaactggcacgttacttatatcctgagttcaaacgttttggtctaggcgtcttatctaaaaaattcggcgtcagcttagaacagcatcaccgagcgatctatgatgcggaagccacgggccatttagcttggatctttgtcaaagaagcgatggaaaagcatggcatgctgctgcatgaagacttgaaccgccatgtgggaggagagaactccttcaaagcggcgcgaccattccatgcgacgatcttggcgaagacgcaagccggattaaaaaatttatttaaattgatctcgatgtcgaacgtgaaatatttccatgacaaagtcccaagaattcctcgctcggaattggtgaagctgcgggaaggattacttgtaggaaccgcctgtgacaagggagaagtctttgtcgccatgatgcaaaaaggggtggatgctgcccgtaaattagcagagttctacgattatattgaagtcatgcccaaagaagtttacgctcatttgattgagaccgaacttgttaagaatgaatcagacctagaagacattattcgcaacctgatcgagatcgggaacgaattaggcaaagtggtggtagctacagggaatgttcattatttgaatgaagaagatgcgatctatcgtaagattttgatcaattcaatggggggagccaatcctctgaatcgccatagtctcccagctgttcactttcggacgacagatgagatgctgaccgcttttcaatttttaggcccagatacagccaaagaaatcgtcgtgacaaaccccaacaaaattgcggatatgtgtgaaaaggtcattccagtcaaggatgatttgtatacgccaaaaatcccaggttccgagcaagaaatcacagatctaagttacaatcgtgccaaagaattatatggggatcctttgcctgagatcgttgaaaagcgattgaaaaaagaattagattccattatcggaaatggcttctccgtgatttacctgatctcccaaaaactggtacacaagagcaatgaagatggctacttggtgggctcgcggggatctgtcggttccagttttgtcgcaacgatgacggggatcactgaagtgaatccattagctcctcattattattgcccagactgtcagtactcggagttttatgaggacgggtcttatggttctggctatgatatgccagaaaaaaaatgtccgaaatgcggcacccgactaaacaaggacggtcatgacattccgtttgaaaccttcttaggtttccatggagataaagtccccgatatcgatttgaacttctctggggaataccagcccgaagcgcacaattatacaaaggttcttttcggagaagattatgtttaccgtgcaggaacgatcggtacggtagcagacaaaaccgcattcggttttgtaaaagggtttgagcgggatcacaatcttcattatcgtgcagcagaagtggaccgattggccaaaggggctaccggagtgaagcgcaccaccggacagcatccaggggggatcattgtaatccccgattatatggatgtctatgatttcacaccgattcaatacccagccgatgatatgaattctgaatggaagacgacacactttgatttccactcgatccatgacaatattttgaaactggatattttaggacatgatgatccgacagtgattcggatgttacaggacttatctggaattgatccaaaaacgatccctaccgatgatccagaagttatgcgtatttttggcggaacggatgttttaggtgtaacagaagagcaaatttattctaaaactggtaccttagggattcctgaatttgggacccgtttcgtacgggggatgttggaacagacccatccgtccaccttcgcagagttgttgcagatttcaggactttcccacggaacggatgtttggctaggaaatgccgaggaactgattcggcgcggtgatgccaacttggcagaagtcattggttgtcgggatgacatcatggtctatctgattcatgcaggattagatgacggtatggctttcaaaatcatggagacggttcgtaaaggacaatggaacaagatcccggatgatttgcgagatacgtatctgcaagcgatgcgggaaaataatgtccctgaatggtatatcgattcttgttctaagatcaagtatatgttccccaaagcccatgcggcagcctatgtattgatggcattgcgggtcgcttacttcaaagtatatttcccaattctgtattactgtgcctatttctctgttcgtgcggacgactttgatttgatcgccatgtcaaaaggcaaagaagcggtaaaagagcggatgcaagaaatcaatgacaaaggcatggatgcatcgacaaaagaaaaaaacttgctgactgttttggaattggccaatgaaatgttggaaagaggctatgaatttggcatgatcgatttatataaatcggatgctgagaattttgtgatcgatggcaacaagctgatcgcaccatttcgagctgtaccaagtttaggtctaaacgtagccaaacaaatctgtgaggcccggaaagatggtccgttcttgtccaaagaagatctggccaaccgaggaaaagtttccaaaacattaatcgaatatatgacagacaatggtgtcttgaaagatttaccggatgaaaatcaattgtcgttgtttgatatgctataaggaagaaatttattatcaactataaaaacgattcgcaggcactatctttctcagaaatgataggtcctcgaatcgtttttttgttttatacatcgacacttttgctgcatgtcataataaaaccatcaacaataatggaatgtaaatcatataaatcaaaacggagtagcctaatgaagaagcagcaaactcttcatctccatggtaatttctaaccaggatcggcacagaattttgaacaggcatcgatgcttggatgataaagacttgcaacatcaatgaaggaacctgtatccattgaccaatcagccacacgatcaatggagagaggagaaaacgacctgcgaggacaccggcaagatccttggtcatacgtaaattcttgataccactatagtaaacgatgatcccaatgatgaacatggatagaggcgtggtcaactcagaaagatagcctcctaggcctgcaataaatttcggtaaaggaaaatcgaagagcatccagatcaatccaataataaacccaatcaatgcaggagagaagatttttttcaacacaactaaagggtgaaaggagacttttgcttcttcgaaactagggctgtctcgagcgatttcatagatcccaaccgtccaaaacaaactagtgttgacaatataataaagcaagacataaggaacagccttttcgccaaaaatagccaggttgatcggtaatccaataaaaattgtattggaaaaagtaaacatggtggagaaggatccatgatgagtgggagctacttgaaagaaacgctgccaaagtttactgatcccataagtaatgacaatggataataatggaataatcattccagaaaacaatgaaaggaattcatcgcgggtaaaattcttgatgatattcaaaaacatacttgccggcagtgagagattcaaaacaagttttgaaaaggtatctgctgtacgatttgagaaccattgcttaaaagacaaccagtagccaataaacatcaaactaaaaatcacaaaaatattgctatatgcttggaacatgaactcacctctctttcactatagcgaatcttgattccataatcaattcaatcagaaaagaataccccaaaaaagcaatcaaaaaaactatgaccgagaagagtcggtcatagttctaaatttattttcgttgttgtttgccggcattacggccttttgcatttttatgattcaagttttttggcgttgtaggctgcgtctgctgcgtaggagtgacatctttccgaggcgtcacgaccgttttaggcggattggctttcatttctgcttcaacttgcgcacgaatcttaggtttcatgatgacatttgtaataaaggtttgcaggcagctgaagaccccgccgacaacccagtataacgttacaccagcaggtgcacttaatgacatgaagacaatcatcaatggcgaaacgatcaacattgttttcatcgtttttttctgttcttctgggattccaatggttgaaatatatccttgtatgagatacgaaataccagcaatggctacaaataggaaacttggttgtcctaaggaaatcccaaagaattccgaattttgaatcccttgtgtgtaacgagcagtaaaatacaaagctgaaaatattggcatctgaatcagcagcggcaagcaaccgattccgccaaacatgctgacattattttcagaataaattttttgcatgtctgcttgtgcttgcatttgttcttcacgagtggtcgcttttttcaagttggcttgtgcgatatctacctgcggtttcaagaactgcattttttcactttggatcatcgttttcttcgattgatggatcccaagcggtaagataatgaggcgtacaacgattgtcacagcgataattgcccaaccataagaccaatcgaagttttctaccagcatggtgatcaaattacctaatggtttcactaagaaacgatagatcatgccgttttcattcggtgttccatcagagtttgtgctgacgcatccggataaagtcagtaaaagtcctaacaatccagacgagagcagccatttattcatttttgacattcttttcttcctcttcactataaatttagacaaaaataactatactaaaaaagaccgactatttcaatgtacaaaaggaaattcattgaaaaatcaatctttcgtcgtagatttagtaaccatattcaacatcaaaacttgttctttccttgatagaaggatcttcttggatctttgtacttgtcactttaccagaaggagacggtgaatctttgaccgcttcaacaaaagcgtctacctgtttctcttcgccgatagcttcgatcgttactgaaccatcagattcatttttgacggatccttggatccccatccggtccgctaacaattttgtcgtgtaacgaaaaccgactccttggactctgccttgaacttgaatgcgtatttttttcatcaaatcatccctcgtttcagtcaacctctatagtatatgatagcgtttttctaacgaaagaacaagtttcatcctttgactcatgctataatgaggcgaggtgaacaggatgaaggaaattctttcaaaaaaaaatatattgatcaaagaggtcaaaaaactcgcacaaaaaaaataccgcaatcaaaccaatacgtatataatcgacggttggcatttggtacaagaagccattgcagcatcggcaccgatcaattatctatttgttactgataaaggaatccaagaaaccggcaatcagttaaaagactatcaagacaaagtatttcgtatctccgatgaagtagctgcttttctatcagatttaccgacaccccaagggatctttgcagtgatcgaaaaagagaccgttcaagaaacgattcatggaaattggctgattttagataatgtccaggatccagggaatgttgggactatgattcgtacagccgatgctgcgggttttgctggggtctttttaggaacaggcacagctgatcgttacagcacaaaagtcttgcgtagtatgcaaggcagcaactttcatttaccgatccttgaaggggatgtgccagcattcatccaaaaattaaaagcccaagggactgctatttacgggactgaattgaataaagaggcggtttcttatacggagttatctaagaaaggaacagctgcgtttatcttagggaacgaaggacaaggcgtccatccagatattttagggttgaccgatcaaaatgtctatattcctatctatgggcaagcagaatcactgaatgtagctattgctgccggtattttgatgtacttttttgtcagttagacttttttaaggaactgttaaactcaaagcaactctttggattctcctagaattctgtctgagcagatgctatacttctatttgtaagaaataagcagtatcaaaaaggtggcaggcataaatctatgacagaaaaatggcaagaagatagcgagtatatgtcttatgtagcagatttgttagagacagaagctgtaaaaaaattagccaattatgttcaacatatgagttccacacgtttagaacattcgatcagcgtttcttattacagttataaattggcaaaaaaatggggcggcaatgctcgtgcaacagctcgggctggattattgcatgaccttttctattatgattggcgtacaaccaaattcgatgaaggaacacatgcctatatgcatccgcgaattgccgttaaaaacgcagagaaaattactgaattaagtgatctcgagcgggacattattttgaaacatatgtggggagcaaccattgcaccaccccgatataaagaaagttatatcgtaaccatggtggataaatattgtgcggtgaaggaagcatcagaaccaatgactcaagccatgaaagcaaaatggcaacaacggttttggcataaacaacgaccaacacatctctaataaaacaggcaagcgcctagaatctgtagtgatttatcagattccaggcgctttttttgtatggtggtgaaacaattggatcgtggtgctcatgattccattcaaagggcatacttacgctagtttccaaagaaaaattcgagaatagtcatcaaaaagatgatgattgcaattccgcctatagctaacgcatgtctttttttgtgcatgaacaaaatggcgatatattctcgtaaaaaagcattcggcaagtaatagaaggctgtgtgtgagccaatcccatctgctttgacatgcgcttggtcggcgtacatccctgcccggaaaatatgatagttattggaagcaaagattgcgtgatatccttctggacgtaacgaatccatgatttctttggagaatttcatattttcgtaagtcgttgtcgaattggcttccactaagatttcactttcagggattccttgagaaacggcatattctttcatggccactgcttcaggaattttttcgtcgctgccttgaccaccggacatcaaaagacgaggggctgttttcttcgcacgaaattgaagatgataaaatgcgatagctttatcgatccgttgggctaataatggagaaactttctcgccattaaggagacctgcccctaaaactataatgaagtcctggtcatagcggggatgattgaattgataaataaccgagatcgacaaaaagttaagaaaaaccacaaaaaaataaagcagcgatgccggaaaaattgtaaataaaacactgacccaacttggtaaggcatgtaaaaaggaatccgataccaacaagatcgttaaaacgatagctaaaaccaatgtcaacaggttggccaatgagtgggattctcggcgtaaaacgacgattgaattccaatagaggaaaataatcaatccatacaaaccaaaaagaaaaacgaatagaaagccaactaatgcaacagctaaaatcccgccgactaaaatatcttctgtccgataaagattaacgagcaaataaatcccaaaggtcaagatgaagacattaaaaagcaaaccattcactaaacgatgcttgtttttaaaataggaatataaaaataatccggccaaactaagcggggctaagataaaaaaactgccagtacgtaattccgaaatggacaaataggccaataaagcggcaatcgtccaacaacactcgaagaaaaagatatctgggtcatcttttttcttgcggtaccaaaaaacaaaaatcgctcctaagatataagcgatactgaaaagcccaatttgtgtaaaatccattcttttcactcctttaaatctaagaacagtatacctaattttcgaagaaaaagcttgcagatgtggtcaaagttgctgaattttcttgaattcgctacaatggatagagaagaaagaaggaggcacaagcatggaattaggtgaagtgatccgagtaacactcccagcgttttatgttgtcggaaaagaagggaaaggtcttgctgaagaaggcccttcatgggtaccggcactatgggatcttgcaacgaaagattttgaagaaatcgagtttttgctagccgatcaagaagcggaaaatctgcagttctggggattgatgagtgacggagagaactggctggaaccatggcaagagacaggacgttaccttgcgggtgtccaagtcactacggataattttccaccagtagattgggtccgttggcaaatgccagagatggaatacatggtcgtaaaaacaaatgaagccaatctaaacatgatgacagagaagatgctgagagaagttcttccagaaaataatgttcaactggcagcagctattcaggaacactacctgcctaattttcaagaaggggaagtagaactgtattttcctattgaaccgattgcgcctgttgtaaccaaagaagagttactctcttaacaaaaaacttccagtgttttagtgattaccggtcttaccggcaacgccaaacactggaagtttatttttgattaaaagagatttgtaaagaaattggcaactgatcgccagccgataacaaaaatatttgctttttcaacggctttagtagtgatcagctcagtagtagggacttctttactaccatccatataacctaatgtatctgcaggaatcgttgctgttacttttcctaaatccgttcctttggcaactggtgcagagacagtttcttcgttcattgttttgttataatcgattgttgtagtgaagtcttttggatccatatctttacgtacccaaacagaaagatcattttttaccgctatgggaacagtaagttctttgccgtttttaacagcgaccgtttttgtatctgctaactgatcaccagcagatagaataggaacttgctcccacgcatcaaatgagtaatccatcagtttgcctgtttcggtgaaacgtacactaggattctcagcatgaccgttgacgtttaacactacggtgataatacgctggccatctcgcacagccgttccaacaaagcaagcacctgctaaatcagtggttccggttttcaaaccgtcaacaccatctttggcgttgatgaaaccaggtagcatccagttccagttgaccatctcaactggtgagtaggaaccttcaccaaatgttttggtaaccgtgctggtgacttctaatacttctgggaagtcttggagcaaatgtctcgctacgatagcgacatcttttgcagataattcattttcatcagtggaagtggaaccagggtaaaggttttctcccagataggtgttattcagtccggaagcattgacaatcttagcatctgtgattccccattcagtgagtttgtctttcatttgatcgacaaaggctggctccgacccggcaattttctctgctagggcaacgaccgcagcattagctgattgaatgtagctcgcttcataaaggtctttaacggtgtattgaacatcacgatgcaaaggaacattggacaagtcaggtgtgacactgaggtcggctgcatattgtgagatttcaacagggtcttcccaagtcaatttgccttgcttgacttgttctgctactagatacagactaatgatttttgtcactgaggcgatgcccatcggggtttctccctcttggtcatataaaattttgcctgtatcgaaatccactgaaaaagcagcttttgcatcgatagaaaagtttttgatttcttcagcggtaaatgtagtctcctcagcgtgggagatcattggtattccggcaataaaaaagagggttgctagacccgcaatcaatgaataccagattttggataatttctgcataggtaaactccttcgtttctgtatctaaatcaaaagtttaacaaagagtttcctgagttgcaatactctaacagaaagttcaaaaattcgtaagaaccagcttttttcttcttgccgaatcacaccagtgatcgctttgtcttgaaacaacagttgtttttagacataaaaaaagcttttctttaacgaacaaagaaaagcagtttttttatctaataaaactatcggcgaatatgatttcggggatcctcactttgcacttttacaggtactttcactgctcttgtttcttgctgcatcaattggcgggcaagaaacagcgttcctccaagtaatgcggctaaaccaaagattgaaaaaagtgaaacaaacgtcgctaacatagaaatcccttctttctgtttttaattaatgtggaaggtaggaatcgaacctacaccttaatctatgaacgatcatctatcactcaacggaacaccttgttcaaccacttcttattactatcatagcatgaactgtctaaaaatgctggtagaaagtctgagcattttcagaggaaatcaagaataaataatgaagaaactttgaagaaatcattcgatttttgtcaaaggatattgccaatcttctgcttcatcataaagggtgaagcgctggtccttttgttcaatgatcaaatggtaacccaatgaatctagtaaaaccaatcttgatggggtcagctcaacgatcacagtaggtgaatgtttcccatcaattgtcagtgaatgctcctctgtgatctcaatggatacagtgtctttcatttttgaagtgaactgccatttccccacgaattgttggcggggctcagttttttgcttttcttttcttaatatgagcgaactggcaacaccggtcaaaagtgacagaccaatcaacagtgaacgttttttcacattttcacatccattcctacctatgatggaactagtataccatggggaacaaagaaatcctcctactttggtcggaactttaaaagtttttaattgaccgtataatccatttatcaaaatcttacagccctcagaaaataccagaaaattgcagcggcagcggatagctgcagcaatgatgctgacccaaagcattgttccatagcttatggtaaaatcagatagaaagttttctgctttctcctactttaattgaaagagagtctttcactgagaatcagaacatcatcaattactagatcaactgatttagcgtttatttaaggaactccggctgttttaaggccgaggtattaatggagagggaaaaagatggaatatccaaatagtcacttagcgatatttattattcgggaaaatcgctttattgcccgctgtcgattgatgtcaggggaggaagtaatcgttcacgtcaaaaatactggtcgaggaaaagaggtacttgttgctggtgcgttagtcactttgcaatactggaatagtccaaagagaaaaactaattatgatttgatcgcagtaaaaaagggcgaccaatggatcaatatcgacagtcaagtcccaaaccgtttggcctatgaatccttattggacggaacgattcttttaccgcagatcacaggcaatctaactttactaaagagagaagtgacgtatcaccgttcaaagtttgatttttattttgaaacagatgtcggagaaaagggctttatagaaatcaaagggatgactttggaaaacaaacgagtgggtgcttttccagatgcgcccaccagtcgcggattgaaacatgtaagtgaactgatagatgccaagaaagaagggtactatgccgcggtattgtttgtcgtccaatttgaagacattgatgtcgcgacgatccatcgtgccatgcaaccagagctagcaaaaaaaatcggacaagcaattgcagacggaatccaagttttcgcgtataattgtcttgtggatgaaaccagcatttccattaataaagcagtaccttttgatcttatggctgcttttgaagacccaaacttataaggaaagagggaatatgaatgattcatttagggataatcggtacaaattggatcacggatcaatttgtacaagctgcacatgaaacgggacgctaccatctaacggctgtctattctagaaaactggcgactgctcagtcttttgcagagaaatacggagaagtgacttgtgtagatgatttaacggctttctttcaactagaagaattagatacggtatatattgcatctcccaacaatttgcattttgaacaagcaaaacaaggaattttgtcaggaaaaaatgtgatcgtcgaaaaacctgccttttcgacaccatcagaaatggctgagatcattgaattggccaatgaaaatcaagttttattttttgaagcagcgcgcaacattcatgagaaaagttttgacaccattgcgtctgtcttaactgaacatggcaatatcattggtgcaaactttacctatatgaaatactcttcacggtatgatgcagtgttagcaggagaggagccaaatattttttctccccatttttctggcggcgcattggtagatctgggtgtttatcccgtttatgcagcactagcttggtttggcagaccacaaaatgtttattattttgcccggaaaatcgtgacaggagtcgatgggatcggtacgatcattttacgttatgaaacttttgacgtaaccattcaaactggaaaaatcggcaactctgacttgaaatccgaaatatattttgaaaatggaacactggaactaaatgcagtcaatgccattgaacaagcggtattttatgaccgtacaaataatgaaacggtattaccggtgaccgcgcaggcaaatccgatggtcgaagaagctgcagattttgcagaagtcatcgaaaataaagcagatccccaattgggtgcgcgctatgaagaatggatcgaattagctcgtgatgtcaatgaagcgatctatctcatgagaaaacacgcagaaatctcctttgacgcagacaaagagtaaggaatggaatgtatgacagcaacttatttagcagaagtttggcaagaaaaatggcaaagcagcggcttttctgcgccatcactgattcaagaacgggtttaccccctcttgaaatcaggacaatcagtagtaggcgtttcgccgacaggttcagggaaaacattggcctatttactacctttattggaaactgtaaaagttggtgaaggcaatcagctcctgattttgacctcttcccaagaactggccatgcaggtcacacaggtcgcacgagattgggcccagcttttagatttgcaggttttaccactgattggcggcgcaaatactaagcgacaaattgaaaagttgaaggccaaaccagaagttttggtggggacaccaggacgagtattggaattgctcaaattaaaaaaagtcaaaacgcaacagattcacggggtagtcttggatgaagtggatcaattactgaaagaaggggcctttgggctcgctagcaaaatcttgacgcttattccaaaacaggcgactcgcagtttcttctctgcaactgccaatgaggttctaaaagaaattcaagaactggcttttgaaacaccacaggtcattgatgtgacagaggaagaccagagcaaaggggtgatccatcattattatttgaattacccgagtcgtaaactagtggatgctttgcgccggttggcttacttaccagattttcagggattgatttttttcaatgaattaagtgcattaggtaatgctgaagaaaaactgctctttcatggtttgccagtcgcctcccttgcttcagaccagaacaaactgacccgccgtgcttcgcttgatgggttccgtcagggaaagatttgtgaattactaacgacagatgttgctgccagaggattggatgtcgatcagctggggtatgtggtcaataccgaggttccacaagagaaagaatcttatcttcaccgagcaggtcgtgtgggacggatgggaaatgagggcacagtgatcacgatcgttcaagaccatacattaaaggatctaaagaaaattgccgcacagctggatctaacgctgcaagaagttttcttgcatggaggtgcgcttcacacagagcgtccggaagttaaaagtgaacctaaaaaagagcagagtgtgcagaaaaattccagaaaaacttctgaaaaattacacactatgccaaagaaaacgaagaaaaagcaaaaaaaccaaaaagataaaggcaaaagacgccattgagcgtctttttgtgttaccattaacggtggttaattactagtgtgtaatattgaggaggcattttcgtgaattcaaggaaagaagaaatctttcagacgatcgaactgcacaaacaaggtctgacagccttagaggttgcggagattttacaaatcgatcgcagtaatgcaagccgttatctcagtgaattatttaaagaaaataaaatcagcaagcgtgctggtcggccagtaatctatgaaccattgaatgaggaagttcatgtggatgtgtcctccgaggttagttttgaaagtctggtgggcgttcaagcttctttgaaagtcagtatccaacaggcgaaagcggccattctatatccgccccgtggactgcatactattatattcggcgaaaccgggaccgggaaatcattatttgcggagtgtatgtatcatttcgctgtggaatcaaaaatgctgaaaaaagatgccccatttgttgcgtttaattgtgcggactatgcgcaaaatccccaattgctatttggtcatatctttgggatccgcaaaggagcatacactggcgctgcggaagatagtcccggactaatggcgaaagccgatggcggtattttgtttctggatgagattcatcgtttgccgccggaaggccaggaaatgctctttacctttatcgacaagggagtctatcgtcctctaggtgaaagcaatcaagtgtacgaagcttctgtgcagatcatcggtgctacaacagaatcttcagaaacatttttgacgacattcaaccgaaggattccaatggccatcactttgccgaatgtggagagtcgttcactggatgaacgatatgaaatcatctccttatttatcaagcaagaagcaactcggctcaatcaacggatcgacgttgagcgagatgcgattttggcctttatgctgtatgaagcagaaggcaatatcggtcaaatcaaacgtgatttgaaattagtctgtgccaaagcatttctccattatcggacctacggcaaaaagcatttattgattcgtaaagaagattgttcactgcaagtccaaaaaggattgttgaaaatcaaagaaatgtcggaacgtctcgatcgatttttagaaggcaaaggcgattttttgagtttcgagcctggggatcaagatgttgtttggtcacaagatcctcaaagaaatatgcaggtttacaatgagattgaagagaaagtcagcagcttgatcgagacaggtgttgcaacgatcgatctggaaaatctgatttccaaggatgtggatgcctattttgaaatgtatgtagaagagctgacgcaaaatcccgttcacaaagagttgattccagaagatatttggaaactgaccaatcacctttatgatatcgctgagcaaaaattggatcgtacatacaatgaaaaagcacgttttgcctttgcacttcatcttcaaagtacattagaacgcgtaaaagaaggccacatgatcgttcatccagacttaaatacgattcggaaaaatctgaaatcagagtttcaggtggcgatggatctatcaactattattgaagaggaacgacacgtggagattcccttcgatgaaattggctttattagtatgtttctagctattcaggtgaaaaaacagatcatgccgcttgagaaggtagaagtcgtcgtcttgatgcatggaagagcaacagctagcagcatgctggaaaccgcacaggagctattggaaaccactagcggttatgcaatgaatatgtcattggatacagaagtgggcgccatgtatgaaaagttactggcctatgtttctaagaataaagataaattaagcaatggtctattgcttctcactgatatgggatcattgaactcttttgcaacacttatttatgaagaaacgggcattcggacgaaagcaatctccatgtccagtacgatgatcgtgctggaagctttgcgcatggcagagagtggacgcagtctcgaggatatctatcaaaacatccagcgttcctttgagacgatcgttcaagagcaattccgcacggttcgggaagccaaaggcaataaaaaggcagtaatcgttacgtgctttacgggagaaggtgtcgctgccaagctgtatcagcgcatctatccggtcgtcgatcaagagaaggtcgaaattattcaaatgcaatttattgagaaagaaaccttcaagaaacacatcgatgggttgctagaagaatatgagatcaaagccatcgctggcacagtagatatcgattatcaaaacattcctttcttttcggcttatgatgtctttgatgacgaacggttgaatgtgctgaagcgaatcgtttctgatgaagttcccatcgagaaaattgttcgctctcttgaaaatacccttacgcatgtcgggtctgtctaccatttgatcgagagcttgcaacgaatcgtccatcaggttcagaatcagctgcatgtgacactagaaccgactgtagatgccgggttagtaatccaccttgcttttcttgtggagagcaatttgaagaaggaaccttcccgagcatttaaggatttagcaagcttccaaaagcggtatcgaatcgagaccgatgtgttgcgaacgaacttgctgcaaatcgaaaaaaattatcaaatcaagatctctgaagatgagattgcgtatctcacacagatgttcttagaaaatgaaataaaaaatcatcatgaatccgcacacaatattagtgtgtaatgagaaaaagtaaaagtgtgtaagcgttaaattggtgcagaccattgttaaatcaaggtttgcactttttttattttggcacgctttttgctttatagtaaagtgtaaataataatttagaaaggagtgacaatgatggcgaaaaaaacgattatgctcgtatgttctgctggcatgagtactagtttgttggtaacaaaaatgcaaaaagcagctgaagcaaaaggaatggacgcagatatttttgcagtttccgcttcagaagcagaccaacatttagaatcaaaaccggtggatgttctattgttaggcccacaagtacgttttatgaaatcacagtttgaacaaaaattagcacctaaagggattcctttagaagtcatcaacatggctgattatggcatgatgaatggcgaaaaagttttagcacaagcagaaagcttaatgaagtagtgaagtaagaggaggatttttttgatggacgagcaaaatttggaagccattatgggtttgatcatgtatggcggaaatgcgaaaagtgatgcaatggaggcaattgcggcagccaaagaaggaaattttgaattggcagaccaaaagattgcggatgctgaagcatctttagtagaagcacaccactcacaaactggtttgttgacacaagaagcacaaggcaaccatatgacagtgaccttgttgacggttcattcgcaagaccatctaatgacatcaatcgcatttacagatctagcgaaagaaatcattgatatttatcgacgtatgagtaacgaataatctttgaacggatagaagtagttatttgttgattttatctcttagaaaaatcttctttggcgaatagaacttataggaggacataaaaatggatggattaacgagttggatggagaaatacattctccccgtagcagcgaagatcggtgctcaaaagcacttagtagcgttgcgtgatgcgtttattggaacaatgcccgcgacaatggctggttcgatcgctgtaatgatcaatgcgatcattcgcgatctgccgccacagttttggcctagttatgatgcaagtacaattccagttatacgtgaaattattagtattaatgggtttgtttggaatggtacactagctgtagctggattggtttttgctttttcttgggggtataacttagcccgagcataccgcgtcaatgaccttgccggtgggatcgtcggaatggcgacactgatccaaggaatcgctttttcatatagcacatctgttgcgacgacagttcctgcaaatttgatggatgaaatcaatgctggtacagcaacaactggttggtcagcaacagctgaaggaattacagctggcggctggggctggttgaatttgaaccatctaaatgggaatgcatactttactgtaatgatcatgggagcaatctcagtcatcattttctgtaaattaatgttagccaatattacaatcaaaatgccggattccgttccaccagcagtttcgaaagcttttgccgcaatcttaccggcaacgatcgctttgtatgttattgctattattaactttattgttggacaattgacggatggacaattgattatcgaccttgttcagaaatatattgctgaaccattcttgggtctttctcaaggaataggtgcagtcttgatcgttactgtttttgtgcaaatcttctggttctttggtatccatggtccaaacgtattggcaccagttttggaaggtatctggggacaagcacagttgatcaatattgatattttccaaaaaggatatgatggaaaaactggaacaagcgcggtattagcagccattgaagatggaaaagcgtatatgtgggttcgtggatcattcgatgcatttgcatggtttggtggttcaggtggaacgatcgttcttttgatcgccatcttagttttctctaaacgtgcagactatctgacagttgccaaattatcaattggacctggtatcttcaatatcaacgaaccagtcatgtttggtttgccaatcgtattgaatgcgatcatgttcattccattcattattgcaccgcttgttgctacaacaattggttggttagctacttactggggattagtctcaccagtttctcaacaagtaacttgggttgtgccgccaatgttattatcattcttagcaaccggtgcagactggcgtgcgccaatcgtcactttagtatgtatggtggtcaccttcttcatctgggcaccatttgttatctcagcaaataaaattgatccaaaattaggcgaatagccctttaatcgagaggaactgctatcgcttcatagttgaggtagcagttcttcttttcattcatttagaatacagttagaaaacagcagcaagaaaactgctcaaggaggaataaaaaatgatctcaatcgcaagtgctatgcaacaagatgcaatcaaagaattattagaaggatacaatgaagacggtgtgtcttacacatttaaagaaaaacaagggatcaaattgatttttactaccacagctgacgatgcagaagcagcagctaaaaaagcgaaagaattgattaaggcccaaccatggggatctgtgctatactttcaagcaaccgctgtttgatgtcgtaatacaactgatgtcagggacgattaaatagatagggatgaatcaaaatgataaaaaacggcttatttttgtgcagtatcgggttgcttgtgattttgtatagcatgaacccaagcaatatgcgtttagacattttcagttttactactggaattgctttgctgataggcggcggtttgttgtttatgaaaggcaagaaaaaagctgatcaatcaaatggaggacagtctaaatgaaaattgaaaaaacattgaacgttccaagtccagtctttttcgataaaataatcgactcagtgatatttgatatccgcaaggcaacaggcaaaacggtttcccgcaaacagttagccggatatgagtacgtcaaggaattttcagcttccagccgtgcaaaaatcaaaattgaagaagtcattgagaatcaagtctatcagtttcggacagagacaaccaaaaatgagtttgtcgttcgctatgagctggaaacgataaatgaaaagcagacaaaggtaatttatacggaaacgatgaagtcattcggtattttgcaacaaatgaatgatatgctgcttggaacgattctaggttattttaaacgaaaacaattcaaaaaaatgctggttatgatggaagaatcatattaaaggggtcctgtgacgccttttttgtgttttccaggtaggtaataggaggaaatcggatgagtgatgtacgtagaatggatgaagcaggcccacaagaagttttggatttagtggcttatgctttccaatgggaattaagtgtgaaaaataaggagcgttatcgcttactagcagagaattcatggaactatggttcgtatgatgatcaaggaaagttggctagtcaaatcatggccacaccttttgccattgattttcatggaacaagctatccgatggcaggaatcggttttgttgcgtcatatccagaatatcgaagtcagggaagaatcgaccgcatcatgcgccacatcttggaagattgttatgagcagggaattgtcctttcctatttagcacctttttcttttcccttttatcgtcgctatgggtatgaatacgtctttgaacgtatggtctatgacgttgctgctcatgaatgggccgatagtcccaaagtaacaggttcgattcagcgtctgccatggtcagaggctaaaagtgtgatccacgatatttatcatgcgatgccaagacataaaaaaggcggattgctgcgagcagattggtgggaaacgatcaaatttacgtatcgtaagccgtatacatttgccatttaccgcgatgaagctgggaataataccggttatttagtttatacgattcaagaaggcaaattcatcattgaagagtggggatacttaaatattgaggcttatcacggattgaatcgattgattgtctctcatgcccgttctgttgcccgaatcatttatcaaccaggttatgacaatgatattcgccaggcaattgctgccaaaccaatagcacactatcaggtgagaccggatatgatggcgcgggtagtcgatgttcatcgctttttggcgcaatatccttttacttatcagctaaatggagcttttgctattgagatccaagaagataaatatgcgccttggaacaatgggatttatgaaatctctatcaaggacggtcagcattcagtcgaaaaagtaacgcagacgcaacaaccaatagtaaaaacaaccgtgcagcgttttgtccagttatttatgggataccaaacagttgatacaatggttttcttggaacaattagtggtaaatgatgcagcaataaactgcatcaagtctaatcttccaataggaaaaccaatattagaagactatttctgatttatcgagtcgtccaaccagcaaaatacctgatggttccctcgcgttttaggtaggaatcctttaagaaatgagagcagtgatacggacagctgatggaccagatctgttttatcatctttggttttaacttgcttcttagacaagtgttctgttgcagctaagagttttttatctgataagcaaaaaactcttgtccaacaagagtttaacaggttctttcaacgttccctgccggaatcgaaccagcaactaatccttaggagggacttgttatatccatttaactaagggaacacaacaatcccattttacctgtaaattcatcttcctgcaaccctaagtcatagttatttttgttgcgggataagggaagatgaggaatagaaacccgatttatgcaatcgttttgctttatggataaaaataggcatggtacactttaggtgtaaccgatcaagtaggaggtaatgttgaatggtaaaatttgggaaagcttttttgtcgcaattaacaactgacggaatcaatggaccatttgtcacgatcatgctaaatactcacgtaggtcaccaaaatgtagagaaagatcaaatcaaattcaaaaattttgctaaagaagcaaaacgccgatttgagaagagatatcccgaccactcatggaacaaattccaggaaaaaattgagactctgcttgctgatcaggcattttggcgcagcagcaccaaaagtgtggcagtgatcttaacagcagaagaaacattgatccatcgcttgagtattcccgtggatgatcaatactatgtcggagatacaccttatctgttggcgatcatcaaaaatgcccaattcaattatgccttttatttacttgcattgaatcgggattccatgaaagtataccatgttgaaaacaagcaagtcactgaagtggcattgcctgaagacgctcctgttgacattgagactgctcttggtgaagaaatcagcggtggtggagatttcaattacagtgcacaaggtgcaccaaacagttctggtgaaggcgttgcctaccacggcttcagtgctaaagacgaagaggttgagatcgatcatgtcaattactaccaagctgtagacaattattttaaaaatgaatttccaaatgaggaaaatttaccgctttatctttttgcactccctgaaaatcaaacattatttaagaagattgcaaaaacaagtttcttcaaaaaagatgcttgtattgcgtcatcgcctgcttcattatccccacaacaaattgctgagtgtgcgcaaaaattgatggacgatctgatgcagaatgaagtagcttcttacaacaaactgcttgaccgcaaatttatggatcaattagtggacattgtaccagcagcgaaagaaggacggatcgcgcagctctttatcgccacttcaaatttagtggatggcttcggagaagacccggatactgagtatgatcgtcggcaagtgctgaatacattggccaaaaatgtgttggaaaacagtggagaagtctctatattggagcaaaaagatgcgccggatgagaaaagtttaactgcgatcttgcggtactagtttcctaaatatccgtaaagcaccagttgaataaattagcctgtgacataaacaacaagaagaataatctgaacgatttaccaggattgcttatcccttgtatagttgctactagaacttacaaactgtaggagcaatcgtagaatttttcggattagtccctttgttgtagaacatatgtcacaggctttttctctaaaaaagtgccttctttgtggggaagttaagaaataattgcgttttcattttttttaagtttgcgatagtcaagaagcaaaaactgtgctataatacgaagtgtagtttttgttacggtaatttatggtagcttgtttcattttaaaacatctcccacattttcaccatatacaagtaattgcaaaatatgtgttttaacacaaggaggatttttattatggaaacaggtacagtaaaatggtttaactcagacaaaggttttggtttcatcactgcagaaaacggaaacgacgtattcgttcacttttcagctatccaaggtgaaggcttcaaaactttagaagaaggtcaagctgttactttcgatatcgaagacggacaacgtggaccacaagctactaacgtaaacaaagcttaattattgcctatcagagcagcctagctgctctttttttgtgctttcattcaaaagaaggtagagtctaaatttgtttgcattttctgtatttgttatacttgaaaaaagggggactcaggatgggactgaatgaatttattttgggactggcgaatttggaaaagattcaacgggcgccggggttctttaagtttacagaacatagcgtcgcggcgcattcttttcgagtcgcaatgattgcccagacattggctgatattgaagagcaggcgggaaatacgatcgattggcagattctctatgaaaaagcattaaatcatgattatactgaacgattcattggagacatcaaaacgcctgtcaaatatgcaaataaagaattgcggcaaatgctttcgacagtagaagaaaagatgacagatacattcatcgaagaagagattccagaatcatttcagccgatttatcgtcgtagattagcggatggtaaagatgattccctggaaggccaattgttggcgatcgcagataaaattgatttgctttatgaatcttttgaagaaatttcaaaaagcaatccagataaagtctacaaagaaatgtttcgcgaagcagtaatgacggtcaaaaattttaatcaccgtcctagtgtgtcttacttctttgaagcggtctttccagaactattgaatgcagatttctatggaaaagaaaattttctagaagaaatcgcaaacctaatcaaaaattgaaatggtctgtgaaacaagtttacctatggaaaaaacatactaagagcagaggagaaactcatccgtcgataagttcctcctctgctcttagtatgttgtatgtttttgaagccttgtttcacaggctttttttattacaacaatgattctgctccatcaacatagacttctgtacccgaaatgtttcctgcatcttcagaggaaagaaacagcacgaggttagctacttgttctggaataccagtctcctgacgcaaaggacgttcccgttccggaaagacgattgggattttgattttttcaacagcctcttcgatagccgtattctcatcaatatttgttgaaatcgctcctggacaaatcgcattgactcggatgttgtagccggaaagctcgagtgccgccattttcatgaaagcaacttgaccagccttagatgtgctgtaggcactagcgccgaaatttttgaaaattcggttgccgttaaccgaacttgtgatcacgatactgccgccgttgatttttaaaaaaggaattgctgctttaactgtgacaaaagtactgcgaagattcgttgtaatggtcgtatcccaatcatctagtgaaagctcttcgataggggtccaggttccattgatccctgcattaacgtggagaatatcgacaccacccaactcttgtgccaacgctgtgactgcctgtaagagctcttctccttttgatacatcaaccacacgataaatcgattgaccttcagtagcttctacaaatgccttcaattctgtttcatcaatgtctaatagaccaacgactgctccttgatccagaaattgctgggcaactgctttgccaatgccggatgctgcacccgtcacgataacccttttattttcaaaccgtttcatttaaacgcctccttcttaattaaattataaaaaagttcctgacctttgtcgaaagatacggatggtccattgatttttgataggatgaacgtatgaggactttagtcctaaaatcaagcttctcgtctgattgatctcaaaatttgatttcctcgttattggctaaaacagatgtaagaggcaaagattttgtagtataatgcaagaagtgcgtaaggaggaagcgaaatgaaacccatatacgctgtggtcgaccttgaaacaacggggactgatcctgccattgatcgaatcatccaatttggctgtgttttgatccaagatggtcaggtcattaatcgatttgcgacagatatcaatccggatcgaagaatatcaaagcagatccagaatttgactcatatcaccaatcaacaagtgaaacgagcaccgtatttcgaagatgttgctcatacgatttataatttgttaacacaaacagtctttgtggctcataatatttattttgactatcatttcttaagtcaagaattaatccgatgcgggatgccgccccttgagattccaggaatcgataccgtggaattggcgcaagtttttttgccgacagaaagcagctttcgtttgggagatctggctgaaagtatcggatttgttcatgagaatccacatcaggcggatagcgatgcggaagtgaccgcggcattattgctgtacatcgaatcgatcatgcgtgaactgccatgggtgactttaaagcaaatcgcccagttgagcggtcaaatggggatgcagaccagtcagtatattcagcggatcgtcagtgaacgtaccgaagagccgcttcctgaacatttggaagaaatcgatggattggttctgcgaaaaaagagtgtgccattgtttgaatcaagctattttcaaggagagtatcctaaagttaaagcggataagatcaaatgttttgatggtcgcctcagttatcgaaaacaacaagcgcggttgatgaatgctgtttatgatcacttttctcatgaagaaaaaaatctgatcattgaggcagaaaccggcatgggaaaaaccatcgggtacttatttcctgcaagctacttagctactccaaaaaacccattaatcgtcagtaccacgtcgattttgctacagaatcagatattggctaaagacatcccattagtcaatcaagtactggaacaaccgttgcaggcaactgttgtgaaaagccatcaacactacattgatctccagcggttcaaagcaacattagaacaaccgcttgaacaaaaacagtatgcccagtaccagatgggacttttagtttggctgaccaaaactgagaccggagattttgatgaattgaatcttgtgcgtcttgatcatccgttgtttttggaaatccgtcatcgaggggtggattttttggcaaagaatcaatctttttatgagcaggattttgtgcgccatctctataataagatgacacaaagcaatgtgctgattgtcaaccatgcatttttgatgcaggaaaatcggcgacagtatccactactaccaacgagtgactttctgctgatcgatgaagtccagcatttgccggagattgccgaaagatattcgcaaaattcctttgattcccaacagttcaaacgacaatttttgcaaatgaatgaagaaggtttgtttgaagagatcaagcaactcgtcgctgaagaattcgatctttcccatttattttcattgtatatcgatgccatcaaattgattatcgatacgctagaagcctattttgaaacactcgtgatcgatggggaagaactgacacttgtccaacgcaaggatctttacgatggcagcttgcagcaagatcgtctccatcaaaaaattcatttgtattataaagaaattttagaaatccaacagcgattgcagacaaccttcatggcgacagaagaacggcgattggctcgggagcgcatcctgattgcccgcttgttcgattatttccatgatatggaggtacaggcagcgacggttcaatcgtggctgatgaattggcaacctcggtatgtccattggatcaagaaaaaagcagggactgctgcagcgatgattgaagtggcagacctgaagggaaatcaaattatcgaaagcaaatggtattcaaggtacaaacatattctttatttaggcggtacattgaaaattcctggtaacaaatcttactttgctcaccgattaggcattcctgaagtgacggtcaaaacgattccggcattttatgattatgaaaagcaagcacgcctgtttattgtcaaacaaggaatctcaattcagcaagcaacgaatgaagaatacgcgcaatatttggccgatgcattaacaccgttgctatttgaaaatttgcagccaacacttgtattattcactgctcatgaaacattgaaacgggtctatgaaaaactgcataaaaaagccttggaacaaggacgagaacttgtagcacaagggactggcggtagtcgcgagaaaatcatcaagcgctttttactggcggaaaatgggattctttttggaacagatagtttttgggaaggcatcgatttacccggtcaagcgctcaaaatcgcggttgtgacgcgcttaccatttgagaaccctaaacgaccgcttgttcaagcacgtcatgcttttttagcatcggaaggcattgatcctttcaaggaggatgcattgccaaaagcaattatccgaatgcgtcaggcgttgggacgtctgattcggtcggaaaatgatcaaggagtaatggtggttcttgatcgtcggattctttctacgaagtatggcaagcgaatacttaaaggtttgccaaaaaatctgccggtcaaagaagctacaccacaagaaatgaccgaggacatacgggcgttttttgattctggagcagaagaaacaccaaaaaaacatttttcttaaaagatagctgaaatctgctataatagagcatattatttttatggaggataacgagtgaaaacgaaagacaaagaacaacgccgtgtgatgattttactgggtgcgatcgtttttttattgatcgttatcatattctcatcaattttctacatccgttcgactcgtccgatgcgacaggcacgcaatgaagcaatcgaaattgctcaaaagtatacggatttgaaagaggtcgatcaattttattggtttaatcgtcaagcctcttcttttagtttagttggtacagatgataaagaaaataaaatcgtcgtcattattcctaaaagcggtgaaaaagtgtcagtttttaaacaatcagatggtctaacggaagaagccgctcgtcaattggttgccgaaaagcatccagaagaaacgatccagaaagctactttaggattgtttaaagagcaagctgcttgggaaatcatgacgaaagatgcttctggtgaacttcattattatttgctaggttttaaagacggcaaggaaatcaatgccatcaataatatttgatttagagaaaggatggttgacatgacactctccaaacgagcgtatcaagtagagccctcagttacattagctgcagctgccaaggctaaggcgttaaaagcgcaaggcgttgacgtattgagtttgacggtaggagaacccgactttattactcctgagaatattcgtcaagccgctatccaagccattgaaaatgggaaggcaagtttttataccccgacagctgggatccctgagctaaaagaagccatcctacgctatctgcaggagttttatggcgtaacgtatgacaccaaccaagtgatcgtaacagatggcgctaaatttgcgctttatgcgttgtttcaagcagtgatcgatccagcagatgaggtgattattcctgtgccatattgggtcagctatgcagagcaagtgaaactagcaggagggcaaccagtcttcgtctatgctgcggaaaccgagcaatttaaagtaacggtttctcaactagaagctgttagaacagccaagactaaagccattattttgaattcgccttccaatccaacgggagcaatttattcgaaagaagaactacaggctattggagagtgggcagttgtacatcatatcttgattgtttctgatgatatctatggtcgtctgatttacaatgggcactcctttacgccgattgctagcttgtctgaggctattcgtaagcaaacgatcatcattaatggtgtctcaaaaacatatgccatgactggttggcggattggatttgcagttggcgatcagacaatcattcaagcgatgacggatattgcttctcaagcaactagcaatcctacagctgtcagtcaatatgctgctgttgaagcactgtcagggaatcaagactccattgaaatcatgcgtcagcaattcgaagaccgattaaataaaatctatccgattgttgcagccattccaggttttcaattagtaaaaccgcaaggcgctttttaccttttcccaaacgtcagggaagcaatgaatatgtgcggatatgaagacatcaataattttgtggaagcaattctggaagagaccggagtagcagtcgttactggtgctgggtttggtgcaccagacaatttacggatcagctatgcaaccgattgggcaaccttggaagaagccgcaaaacgtttgcaggattttgttgaaaagaaaagccgaaaagcttaaaatgctttatggaacccttattatcagattggagagaaacgtgtggaatctattcaaattttagatgcaaaaaaacatgttggcgaaacagtacagattggtgcttgggtcgcaaacaaacgatcaagtggaaaaattgcctttctgcaattacgtgacggtaccgcatattttcaaggtatcgtggtaaaaaccgaagtgggcgaagaagtctttcagcttgccaaaaatttaaatcaagaaacggcagttctagtaactggtgagattcgtgaagatagccgttcgaaatttggctacgaaatcggcatcagcggcattgaagtagtgggcgaaagccatgaatacccaatcacaccgaaagagcacggcaccgacttcttgatggatcatcgccatttatggctacgttcttcaaaacaacatgccatcatgcagatccgtaacgaagtgattcgtgctacctatgaatttttcaataataatggctttatcaaaattgatccaccaattttgacagggtctgcaccggaaggaacaacggatctttttgaaaccaactattttgatcaaaaagcatatctatctcaatctggtcaattatatatggaagctgcagcgatggcatttggtaaagtcttttcattcggaccgactttccgtgcagaaaagtctaaaacgcgtcgtcatctaatcgaattctggatgatcgagccagaaatggctttcatgcatcaagaagaaagcttggaagtacaagaacaatacgttgctttccttgtacaaagcgttttggacaactgtgattatgcattagatgttttaggcagagatcgtgccattcttgaaaagtatacgaaattaccattccctcgtatttcttatgatgatgccgtagaactattgaaaaaaaatggctttgaggacattcaatggggagacgattttggttcgccacacgaaacatttattgcaaactcatttgatcaaccagtctttattcttaactatccaaaagccatcaaacctttctatatgaaaccacatccaacaagagatgatgtcgtgatctgtgcagatatgattgcaccagaaggctatggggagatcatcggtggctcagaacgggctacagattatgaattcttgctagaacaaatccgtaaccacggattagatgaaaatgaatactcttggtatttagatcttcgcaagtatggctcagttccacataccggttttggtctaggtcttgaacggaccgttacatggctatcaggtatcgaacacgtgcgtgaagccattccattcccacgcttattgaatcgtatttatccataggggatattaaaagccagcttctgggtaggaagctggctttttttggtaaaaggaagcaaggaatcttaggggaatgaaggtgcgagtttttggatttatcaaaagatcaccatatgccggaaggtgtaacttttattgaaatataacggttttgttacatttattttctttttgcttattatcaggtaaaataagaactaatgtaaataaatagaggttatttatgattaaacaaattgcaatttcgttttcaaaaatcgtttacttgtccttagttaaacttttttcactaaggagacgtcctaaaaacaataaaatcgtctttttgttaagttttccatccacaagtacctatgttttggatgctttagttgaaagatacggtaatcgtttggttatttgttataccagcaatgcgcaagaaacgattaaacgatttaatcaagaaagaatcgactgctatcctctgcagtcattttatatcttgtgtactagaatcatcccgattattaaagcgtcgcaaatgattatatgtgataattatttcgcctttctaggggggatgtcttttgatgaacaaacaaaagttgttcaaatatggcatgcaaatggggcaatcaaaaaatttggtttgcaagcccaatatgctaagaaagcaactgctaaggatcaacaacgttatcaaaaagtatatgatacgtttacgcattttgtagtaagttctccgacaatggctgaaatttttgctgaaagttacaatatcgatcctatctttttaaaattcggttatcccatgacggattattatttcaatcggaacgaaaaaaacattcttaaagaaaagaatattttatcaaaagggactaataaaaaaattgctctctatgttccaacctatagagaaaacgactatgagcttccgctggacttcgagcaaattgaagaacaaattggtgatgaatgggtattctatatccatgcccatccccatgataaaaaattaaaaagcttggctaagaaatatccatcttattttattgatgaaatgcaacatgacctaaaaaatttacttattgttgcagattgtctgatcacggattattcctcagttccatttgaattttctttagcgaatccaaatggaaaaataatttatttttgttatgactatgaattatatgatgatcttgtggggatacaagaggccttcaaagatactctggattcttcaatcgtgaaaacgccagctggattatttgaagaaataatgtcctccgaaaaacaggacttcgtggattttaatgcgaagtggaatacgtttgtttctggaaatgcaatgaactatttatttgaatggattgatgaacaatatgaaaactgaagagataatgggaatttttgtggatcaaattacctatgaggatgtaatcaatgatttaccaaattatatcaatagtagtcgtaaaatgactattgtaagtgtaaacccgcaaatcatcactgaaagcaataaatttcctgaaatcgtgcgatttatcaatcatagtacacatcgcatacctgacgggattggcgtagtcttagtttcgaaattaactggtggaaaaatcaaagaaagagtcactggttacgatttaatgttgaaattattggattacgcaaatactcataagaaaagtgcttttttttatggagcaaagccagaagtcctttctgatgcagttaagaacatcaatcagcgatacccagacctgattgttgcaggcgcagtggacggatatactaagatggacgatggaatcttagttgatcaaataaatgctgctcaacctgattttctttttgtagcgttggggtttcctcggcaagagaaatggttggctaaaaatacaaatgcgcttgaggcatcagtttttcaagatgttggggggagttttgatgttttaagcggtcacgtaaaaagagctcctgctttttttattaattgtcatttagaatggttgtaccgttctttgagcaatccaaagaggattggaagaattctacagttgccagtatttatggcgaaaagtatttattggaagatggtgcatagaaatgataaaacaaattattagttttatttatcgaacgttattcaatatagtcacagcaatctttccagtaaataaaaaaatagttttatttgaaagttttaacgggaatatcccttcagataatcctttagcgatttataatgctatggttcaagacgaagagtttgcaaactggaatctttattggggaataaaaaaagcaaatctattagaagcaaaagctatgtatccagaaatgaattttctttctcgctattcaatgaaatggttatgggtagcttcaagggcgggtttttggatttttaatgcacgaatgtcaaactggtttaaaaaaaataagcaaacagtctattttcaaacatggcatgggacccctttgaaaaaattaggattagatatcaaaaatgttgtcatgcctggtacaaatactaaatcctatcaagatagctttatcaaagaaagtaagcgttgggattatttagtagcacctaatgaatactcaaaagagatatttaaacatgcatttgctttcgaaaataattttttagatatcggatatcctaggaacgatcgtttagtgcaagcaaataatgagtttatagtcaaccaactgaaaaaagaactcctaggagaaaaacgaggcaacgtttttctatatgcaccaacttggcgagatgattattttatttccaaagggaattacaagtttaacatgcctttcaaattagaaaaaatgatacaacttcttgataaagaagatttgctaattatcagaccgcattatttagtaaaagattcaatagatatagatgggtatgaaaatcaagttagggtctgtgttgatgaggatataaatgatttgtttctgattgctgattgcttaataacagattattcatcagttatgtttgactttgcgatattaaagaaaccaatgatattttatgcttatgatttggttcattatgagaatgaggttcgtggattttattttgattatgatagtttacctggaccaatttgtaaagatgaaacatcattctataatgcgataaaaaacttttatacagaaaccagtaaaaaaaatctcaatgataaaaaatatctagaattttataataaattttgctcttgggaaaatggagaagcttctctaaaagtggcagaattgatcaaggcaagtaattaaggggatactatatgagtgcagtagggaatattaagttgctgattaacaaagtattaaacagttttgtttcaaaaaatggtagtatagcgtcgttttatgcaaaattaagtacaatcgatataaagaaaaatacgatactatatgaagtcagggatggtcaatcaattgtagactctccttttgcaatttttaagtatttagtgaatgatcccgacttcgctcattatcaccatgtgtgggtaatcaatgatttagattatcctactgttaataaaataaaagcttcttataagaatgttgattttgtagtgagaaactcaaaagaatatttgaaatggcttgcgtctgcagaatatttagtgaacaatgctacttttcaatctttctttgttaagaaaaaagagcaaatttacataaatacttggcatgggacacctttaaaatatatgggatttgatatcccaggaaatcctgctcattcgcaaaatgttgtaagaaattttttaatggctgattatattctatcgccgaatgctcacacaactgaaattttttcaaaaagctatcgattagacggaatttttcctggagtgattttagaaggaggctaccctcgaatagattgcactaattctattcaacgagaagtcatcaaagaagaattagatgagttaaacctcgtttttgatgataatttgccaactattttatatacgccaacatggaaaggatcttctatattaaatccctcaaatgatgaagaacaaattataagagaaacctatcttttaaaagactattttaagggaaaatataatgtattggtcaaggtacatccttatatttacaagacattaagcagaaatgagcgaatcaaacatattttgattccagatagtttggatccaaatgaggtattatcaattgttgatttattgatcactgactactctagcatcttttttgattttttggttacagacaaacctattattttttatgtttgggacagagatttgtatgaagcggatagaggaatgtatctcccagaaagtgtattacccggacctgttgctgagacagtcgatgagcttattgacctgatagaaaaaaaagatatttttgtggatcaatatagacaaaattatcgtttaatgaaagagaaaatttgcaattaccaagatggtaatgtaactaagcgttatgttgaaaggattttcaaaaaaaggaaatcagaaaaaattaaggagatacttcttagaaatgatctgaaaaaacttattatttatcctggtggcatgaaaaataatggaatcacaacaagttttattaatctaagtaacaatatagattatagcaagtatgatatttctattattctgaataaacctgtttccagtgaagaaataaaaaacttaaataagatcaataaaaatgttcgaatgctatttcgtccaggaaattcactttttactagaaatgaattaatcagagattattttattcagctcttttcattgaagaaagggtggcgcttcttgctaccagagaaagcttataaaagagaggctgcgaggattgtaggaaatattgcgtttgatgttgcaattgattttagtgggtatagctttttctgggcaaaattgattgcattcatgaacagtaataagagaattatttttcaacataatgatttattaagtgattcaaaaaaaatcattaatggaaaggctccgcataaaaaaaatctacctgcagtcttttccatttattacttgttcgatcgtattcttagtgtttcaaaagagaccatggaaattaacagaaagaatttaaaagaatttatcacggatggacaaattggttatacgacaaatacaattgatatatctaagatcatgacaagtggatctgtagatagtagtaatccaaacgccaataatcaagaaatatctaattttagatttacaggaaacatcattgccgctaaaacctatcaagtatatacaagcctatcactgctggaaaaaggagtatatttttccaaaacaattacagaagatgacgaaatttatgtacttgcatcaactttttataatatgaaagagtatgcaaaaattacagttaatggcatttatacaggttggattgaaaaaagatttattcaggcttctaacaaaggtatccaaaaggaagaaacaataatagaaaaccgctcaatgattgctacaattaactgcagcaatgatgaaatgatttattattcaatgagtgatttgaatagtattcgctcaccacttaaatatttaaataatacgtatgcttatattagtaaagagcagaaaattaatgacaccagctactgctacattgaaaacagcaatggagaaatcggctggattaacaaaaattgtctttcaaattttcatcaaacgtttcatctaagggctttaataaattattttttgaataaaaatgtcaaagaaaaaacaattgtgttagataagtttcagtctatatttattcaaggtcaattcaaaaataaaacaacaattggatggactgaaccagagccaattgctggaagcgaacaagtagccattatgtttgaaaaagacgatgtagctttatttacaaaaaaagcaacaattaatcagaaggattactattgtactaattcagcagaaggaaataaaatatggattgaagcaaaaaacattgaggaagcaagagtcaactcaatggaaattcaaagtaacttaattgatgaaagagccaagaatcagaagcggataagcggtcctaccatctcatctgactctatcaatttagttaatatgggcagattatcaccagaaaaaaatcaaatcaatttaatcaaggctatcaagcaaattattgaagatcaaaaaaatgtacgtttgtatattttaggagaaggtcctttaaaacttgagatgaagcagctaatcaaaaaacttgagcttgaagaacatgtctttctgttaggacatcaagaagatcctttttcgattatgaaacaatgtgatttgtttgtttttccttcaatctatgaagggcaacctatggtcttattagaggctttaacgttaaaacttcctgttctagctacaaatatccctgcaaatgtttcagttttgggagagtattctacgacctacattgaaggattttccgcagaggatattgcacaagctatactgaatagaatatgcaaattgaatgatactatgagatttagtcctgaagaatacaatagtgccgcactaaaaagtttttatagagaaatagagacttgaacaatgttaaactgaaaatttatgggtaaagaaaaagttatttaacttttactagtatcaaatagaaaggtgctttttatgataataaaacaacttaagaagactaaaataaaaatctctgaacaactatctttatggttttctgaagaataccagaaaaatgaagttgatacatcaatgatattttatgaatcaagagatggtaaaaatatgattgattctccaaaggcaatgtttgattatttgttaaacgatccttcttttaaagattatcaacatatctggagttatgtaccatcagaaattggatgggatgatttggtggaaagatattctgaaatgtcaaacgttttttttgtagaaagaaatactcaacaatatgtatcttatctatctaaaagcaagtatcttgttactaattcaacttttcagtctttttttgttcctaaaaaagagcaaatagttattaatacttggcacggaacgcctcttaagaaaatgggttatgatattgaaaatgcgaatccagctggatcacaaaatgtagttaggaattttttgtttagcaaatatattatcagtccaaacgcacatacatccgaggttttaaaaaatagtttccgactagatggaatcttctcgggcgaaattttagaatttggttatccaagaaatgacgtgctacaacgtaaggataattctgttttaaaacaattgatagatagaggaattgacatagatggaagtaaagaactgatcctctattgtccgacctggaaaggaacatctacattaaatccctccgattctctacaacaaattttggcagaaacatcttttttgagaagtcaggtgggtgaaaagtataacgttttagtaaaggttcacccgtatatatttaataaggcaaaagaagttgaggaattgaatagatatttggttccagatgatttcgaccctaattatgtattgttagtcacagatatattgttgacagactattcaagtatttattttgattttttggtaacgaataagccaataattttttattcttgggatagtgatatatatgaatccactcgaggaatgtattttgatgaaaatgaattgcctggtccaattgtaagcacgatgagcgatgtaattgattcaataaataagattgatcagataaaagacgagtacagagaaaaatatactgttgcaaagaagaagtttgttagttatgaagatggtttttcgacggagcgagtgataaattatatttttaaaaacaataggagttccgttggaagtgtcaaaaagatgttaaataacaaagaaaaaattttgatttatacaggaggtatgcaaaataatggtatcacctctagtttactaaatctattgaaaaatattgattatcaaaaatatgatgtgacgtgttttatgggtaatccaaatactagagaaaagctggcaaatgttgataaaattccaaaagaatgtcaccttattttcaaaccaggctatgctattcttactccagaagaaaacaaaacacttagaaacattacatcaaagaaaaatgtagataatataaacagcgagttattcccttggaaaggatttgaaagagaggcaaatcgaattttttctaacaacgagtttgatgttgctatagatttctcaggatatagtttttattggacgaaatatattctttcttcaaactcaaaaaagaaaatttgctatatgcatagtgacatgaatgctgacagacaaaaaatagtgaatggaaaacaagttcattataagagcttaggacaactatttagcgtgtacaatcgttttgacatgttacttgcagtttcacctgtaatggcagatgtaaacaaaaattctttgatcaacttcattcctgaagaaaaaattagttttgttttgaattcactagatttagataagctatatggtgatgatgttatatctactgaaaaaagaaatgtcaacataagaaaagtaaattttgaaattgatttaattgacaagcaagatgttattgtatgggaaacgtacaaacaagaattcagtaaaagaatcccatataaaaaagatatgaaaataaaagcaatcgcatatgcaaagtataaaaataacgaattatataaaattctaatggatgatatttatgtggggtgggttgaagcagaaaagtttgtaaaaaattatcctactatagtatcaaaagagccgtataagtcatatggatatataaaaaatgtgaaaaacaaagtattttggatagatttacctacgagtgattctagtaaaagatatggaacgactgatttttataaatatatgtatgttaaaattgttgaaaaagcaattttaagtaatggagatatgtatttccacattactattaataatgaaatagatggttgggtttatagcaatgtaataaatgaaacaattaaatttagtagaatcagaaaaatcaaaaatatttattctaattttcatagattaaaaaacccaaaacaatttccattgctgactcttaatgaagagggatacgtgaaggtaagagatatagctagtaacgatgccttcgaaaaagctgctaataatgaggatgattttgacttttctaatgtaaaaaataaagttcttaaatttaccaaaattattaaaaatcattacggagtgtattatttgatatatgatggaaataaaaaaattggttggttaaataagaacttcctaattgatctcatcgatgattgtatcgtgtcggagaaaaaagtaagtattgaaatctctatagaacaaggtacaataaagtacacagattgtttttttagtaaccctattgttaataacagttctaatacagtaatagttcattctgttattgaatccaccaaaggaactttcttttctgatggggaaaacttttatgaaacaaaagatgttgaagtcataaaagaatttggtaagtatgatctaatggggaactttgttcctatgcctaaaaatcaggattttaacattataacaatcggaagactatccgtggagaaacaacaagacaaattgatttatgcttttcaaaattttaaaaagactatcccgaatagtaaactgtatatattaggtgatggtatcttaagagaagaactgctatctattgttaaagaaaataacttagaagattctgtatttttattaggacatgtatctgacccatttacaattttaaagcaatgtcaactttttactttaacatcagcatatgaaggacaacccatggttctacttgaagcactatctctgggaataccagtttgttcaactaatatacctgcaagcaagtacgttctttcagatggaaaatatggaattctatcagattctaacgatattgatggtatagagggcatgctgtttgagtcatatagtcataagcaaaattttaaagagtttgatgcaattaagtataatatagaagcagtgaatatgttttatgaaaaaataaatagctaaacagtgaattgtaaaagaaaattctatataaaaaattgtttcgaaggagaaagattttatgaagtactttgtatctggtggcgctggttttatcggatctacattagtaaacagattaattgaagaaggtaatgaggttatcgtggttgatgatctttctatgggaaatgttaataatcttattgataacaaaagattgacatttttcaaggcagatataagggatatagaattggttagagaaatatttaaaaataatagtttctcttatattttccatctagctgcagttgcaagtgttgccgattcgatagagagaccatttgaaacacaccaagttaatatggaggctacacttgacttactggaattagcaaaagagacccagaaaaatctaaaaaggtttgtttttgcttcttctgcggctgtttatggagacgatcaagtcttacctaaatcagagatttcgagaataaagccgttgtctccgtatgcaattgacaaatactcgtcggaacaatatgtattactttataatacgctgtatgggttaccgacaagtgctgtacgattttttaatgtttatggtccaaatcaaaatccttcttctccatactcaggagtgttgtctattataacgaatcatttcaaaaaaataagaaataatgaaaaagatgtgtttacaatttttggagatgggagtcaaactagagactttgtctatgttgaggatgttttgcaagctctaaaattggtatcagaaaaagaagaagcactaggagaagtgtttaatgtagggactggcgctcctagttcgattaacgatgtacttggtatatatgaatccgaaatgaatatcaagcctataattcagtttgaagagtctagaaaaggtgatattaaggattcggttgcagatatatcaaaacttaagaaaattgggttttcacctaattatagtttagatgaaggaatagctgagtatttaaaagaagaaatacaatattgataaatgttaaatagttgtggaatggagtaaatctcaatgaaagtgacaaggtccaatagttcgaaatctctcaatacggaaaagatattctcctttatgctagtacttctttcatttgttttaattttactaactttgaattcaaatgttttttcaaataggatagacgctcatgattcttccatgtttctttatttcggaaaaggaatatcggaaggattgataccttataaagatatgtttgatcataaagggatagtattattttttattcaatatatagctaatattgttggattgggcaatatatttttgggaatatttttagtggaggcagtttttttattaattgctttaatttttctttacaaaacaagttatcttgtttcaagaaatcatttgatatgtggagttgtaatattgatttcttctggattattttctgaattatacgaaggtggaaatctttctgaagaatatgcattaacttttatctctatctcaatgtactactttctgaaagagataatcggtgattcattaaaaagttaccattactttcttttaggtctaatgggtggtttagtattttttatacgtctaaacatgatttctctttgggtagtcttttgcataggaatagccgtaagagaaattataaaaaaaagttttgtttctctttttagaaaagctttttacatttttcttggtggaatgtctattgttttgctcattattgtattctctataatgacaaattcagttgaggaaatgatttttcaaacattcacattgaacatgcagtactcttcaacatctctaaaagaacgagtggcagcgtttatattcttcttcggtttattttcagtatatggtctgcctatttggtttacagttttgttttcaaaaattgttattaaatatagagaaatagaggtggagaagcggtctgttattgttttaatcctaatagcactgattttaaatctatttacgattgttgtctctggtagaaattatcgtcattacggaatcacggaaattccttttctgattgttttacagtgcatcgcaatgggattttactcaaaaaaatttagtaggaagaaaaatcttatagttatgtttgtatttcttttttccatgctacctatattcttgccaaccgtaggtgaacgtattaataatgttaatagaaaagaaacgccttcatatcaatcggaacaattagatattgccagatatataaaaaatcattcgaacgaggatgaacaaatttatgttcatgcaattgatgcaaatatatacttacaatctaatagattctctaattccaaattttttgtgcttccttcgctgaattatgaagaatttccaaagttaaaaaatcaatttacaaattctttacaaaaaaatcctccaaagtttattgttatttcaaaaaattcattcttagaggagcatccaaacgatagaaaactaaataagattttaattgaaaaaatcaaacaagattatcacaaagtagacgcattcgataagagctactatgtttttgaaaaacagtagcttaaaatcggtgagattttcatcaatacaacttacaataatgttaaactagagtacgaaaaatatttattttattccactcctcctaactttcgtgtataatggtacaagtcagtattacgaaagttaggaggagttgttttgagtaaacaacatccagaagagaagtccttcaaagacgaagttttaggtgctttgaaaaaacctcaaaccaacgaatcgtctgaacaaaagcgatcatctgttgaggaacctatagaaagtcgctctgcgacccgcagtacaaaaaagcagagcagtatccaaaagggccaaatcaaaaataaaactgttcaaaaaaacgctcaaaaagcgaagcgttcagctcctaaaaaggaagaagctggtttagatgaaaagtcagataccgttcgtaagttacagcggaaaagagaagaccgtatcgtcaatcgcatcgtcacaattgttgtaatcgcattaatcgttattggcggcgtccttggtttttcagtctatcgatatgtcacttcaggattgcagccgttagatccagaaaaaacagaaaaagttgctgttgagattccaagcggatcatcaaataaaatgattggcgagattttagaaaaagataagatcatcaaaagtggtatgatctttaattattatacgaaatttaataatctgactggtttccaagctggtaattatcagttttctccaagtatgactctggatgaaattagtgcccagttacagcaaggagaagggtcagtgacatcagatgcgaaagtgacgattcctgaagggtatgatatagaccaaatcggagatgcgcttgccaaagcaacaagtatctcgaaagatgatttcttagctttaatgaaagatgacaccttctttaataaaatgcatgaagcatatccagagttgttggatagcgcggcaaaagcagaaggcgttcgctacaagttagaaggatatctcttcccggcaacttatgactattataaaggaaacactttagaagaagttgtgacccaaatgatcgataaaacaaatactgttatgtctaaatattacgatcagatcgcagaaaaagaaatgacagtgcaagaagtgttgaccttggcttctcttgtcgaaaaagaaggtagtaaagaagatgaccgtaagaacattgcccaagtcttctttaaccgtctggcagtggatatgccattgcagtcagatatttctattctctatgcgttaggcgagcataaagagttggtaacttacgaagatactcaagtagactcaccatacaatttgtatgtcaacacaggatatggtccaggaccattcaataatccaagtgagcaatctatcaaagcagtgttggaaccaacaccaaataattactattattttgtggcagacatcaatacgcaagaagtctattttgcagaaacctatgatgaacatatgcgtttagttgaaaaatatgtaaacaatacttcgaattaatttttattaggatattagtttacatttaaaaaaaaccatggtaatcttttgtggactattcgcaaaagattaccttttgcagttgatacgaagttaaaaggagaaattaaaatggtagaaaaagtatacccaatgacattagaaggaaaagaaaaattagagcaggaattagaagaattaaagacagtcaaacgtggagaaatcattgaaagaatcaaagttgcccgcagctttggagatctttctgagaactctgaatacgaatccgcaaaagatgaacaagcctttgtagaagggcgtatcaccacattagaaaatatgatccgttttgctgagatcattgataatgaaggcgtagacaatgatgaagtatcgatcggaaaaaccgtcacgttcattgaattacctgatggagatgaagaagaatatacaatagttgggagtgcagaagcggatccattttctggtaaaatctcaaacgattcaccgatcgctcgtgcattgattggtaaaaaaatcaatgatgaagtaacaatttcaacaccaggcggagatatgctggtgaaaatcacagaagtgaaaaaaagctgattttttcgtaaaagtctaagcagaagatcctgatgatcactttctcaaagagaaaaggaccaatcaggatcttttttcggactcgcgacggatgtatgccatcgaagaatccgttatgataaaatagaatcattgggaggaggagcttacatgaaaagcccttggcgttttttctttgtcgtagaagcattattatttctatttgcggtctggcaaattttatcgaatccaccgttattgattttattgattttaggtgttgtgacgatctactttgtttctcgcagagaacgtaaaacaaattttaataattttttgatggttaccggtggtatcgccatctttatcagtcttttaaatagtccggctttgtggctgatgttgatttttgcgatcctttttattggattgaaaggtgtggaaatcactggtgtagattttacaaaaaacacattttggcgcaaaaaacaaatgatcattttagaaacagaagaaccaaagcagtttcatcctcataaaacgaaacaacaatggatcggcaatgagcggatcgggaatcaagtgtatgaatgggatgatatcaatatcgacatcttttctggagatacgatcattgacttgggaaacacattgttgccgaaaaaagaaaatatcgtaatcgtccgtaagggattcggtcgcacgagaattttagtccctgctggggttgctatcaaaatggaacatagcacctttatcggtacagtgattttcgaaggcgagtcaacaggtctgaagaatgagaaagttacgatctacagtccggattatgaggaaaacacccgccgactaaaaattttaacgaacactttgattggggatatcgaggtgattcgggtatgattgctaaattttctcgaggaatgatcgctttttatagtgcggtcactagttttttgatgatgatcttgattcttttttcgtatctttatgctagtggaaagaagaattggctgctagaagtctttcagatcaaactattctttataccgatcatttttcatttattagttgtttcgctgatggtgggcctggctgtctttctattgatttctcttttcagaaaccgccaatacgggccaatcgaagagaagctgcgattgctttcaaatggagatattgatagtccactacttgacacacctatccctcatgcgcaagaaaatcggttgattgaagatgtcgatcgagacatcaggaaattacaggtcaaaatgaaagatatgtcaagtgagcttcaacaattaaatgctcggccgcagctagtggatggcagtacaaaagaagaaatccttgaagccgaacgacatcgtttggcccgagaattgcatgattcagtttcacaacaattatttgccgcaatgatgatgatgtccgcattaaacgaacaagccatccgggacgatgccccggaaatgcaaaagaagcaattggctatggtaacggacatcatcaatgcttcgcagtctgagatgcgagcgttattgttacacctgcgtccggtcacattggaagggaaaagcctcaaacaaggaatcgagcaattattaaaagaattggaaacaaaaatcaagatatccttgaaatgggatatcgaagagtttactatgccaagctctatagaagaccaattatttcgagtgattcaagaattactatcgaatacactgcgtcatgccaaagcggatgaacttgaagtctacttgaatcatattgaacacaacgtgctgttgcgcgtgatcgacgatggtgtaggattcgatgtcgacaatcaaaaagctggcagttatgggctgatgaatatccgtgagcgaatcagtgccgttggcggcacattaaagataatcagttttaaaaatcaaggaacaagtattgaaataaaaatcccgctgcttaaggaggcataaaaatgatcaacgttttgttagtagatgaccacgaaatggtacgtttgggggtttcttcctacttatccattcaagaagatatagaggtgattggagaagctgaaaatggcaaaatcggctacgaaaaggcattgtctttacgtcccgatgtcatattgatggatttagtgatggatgaaatggatggcattgaggcaaccaaagccattctatcagattggccggaagcaaaaatcatcatagttactagttttattgatgacgagaaagtatatcctgcaattgaagctggtgctgccggttatttgttaaaaacatccactgcacatgaaattgcggatgccattcgtgcgactcaaagaggcgagcgggtgttggaaccggaagtaacaacgaaaatgatggatcgtttaacaaatcgcacgccgattttacatgatgatctgacaaatcgggaaaaagaagtgctgcttttgattgctgaagggaaaagtaatcaggagattgcggatgagttgtttattacactcaaaacggttaaaacccatgtatcaaatatattgtcgaaactagaagtggaagatcgaacacaagcaaccatttatgcctttaagcatggcttgacaaaataagaatctcatcataagggtacctcctcatagtcagttgaggaggtttttgatatactagagtaggatttgtaaggtaaaggagcgtttaatgtgaagcagaattacgcgattattggtcttggaaggttcggcggcagtatttgtcgaacattgatagaatccggacaagaagtattagccattgacagcaatgaggatcgggtcaatgagtatatgaatattgctacccatgcggtggtgggcaatgcacaggatgaaatgacgttgcgctcattaggaattcgtaatttcgaccatgtgatcgtagcaatcggtgaagatatccaagcaagtattcttgtgactttgatggtcaaagagatgggggtaccgaacgttttagcaaaggcgcaaaatgaatatcatgctcgggttcttgagaagcttggtgctgatcgagttgtccacccagaacgggatatggggattcgtatcgctcacaatctagtatcaaaaaatatcttggattatattgagctttcagatgaattttcgctggcggagattcgtgtctcaaatccgcgtttctttaataggtccttacttgatttgaattttcgtcaaaaatatggattgaccgttgttgctattcgtcgaggacctggacaagtgatcgtgtctcccgcagctgattcgatcgtgcgtgagaatgataatctactcgtgattgggaacacggatgatgtggatattcttgatgaacatatgaatgattaggagtgaaaaatgatgaatataactattacagaagccgcaattgattggttcaaaaaagaactgtcagtcgaccaaggaagcggcgttcgcttttttggtaaaatctatgggaaaactcagatccatgatggtttttcagtaggaatgtcagtagataaacctgaaaatcctatcgttcaaaagacagtttcagacatgcttttttttattgaggaggccgacgagtggttcttcaaagggtatgatctacaagtcgactacgatgaaaagctagatgaacctaaatatagttttactgaaaacaattaattaaaataaagatacaatgtaacagtatgagtctatgactgaagtttagtggattccatatcgctagctttgatcatagacctgttcgttaggagatgaaaccatgttatcaattatcgtaccttgctttaacgaagagagtagcttaccacttttttttgaagagactgaaaaagtaaaagatcaggtaggcatgccttttgaatatttgtttatcaatgatgggtcatccgatcaaacactcgcagtgatgcgcaagctgcatcaagagcatccagaaagtgtgcggtacctttcgttttcacgtaattttggaaaagaagcagccttgtatgctggcttaaaagcagcaaaaggggattttgttaccgtaatggatgcagatttacaagatcctccacgccttttgcctcagatgtttgacttgctcaacacaaaacaattagactgtgttggaacgcgcagagccgatcgcaaaggggagcctaaagttcgtagtttcttttcagaagccttttatgcattgatcaacaaaattggtgaagcacatatggtcaatggcgcacgagatttccgtttaatgcgtcggaatatggtggatgcagttttagaactttctgaatacaatcggttctccaaaggaatctttagttgggtaggttttgatacagaatacattgcctacgaaaatcgtgaaagagtagctggagaaacttcttggtcattctggagcttattcaagtactcgattgatggcatcgtcaatttttctgatacgccattaaatattgcttcttttgttggcgcgttgtcttgtctagcttctggaattgcactgctattcataattattcgtacttttatttttggtgatcctacctcaggctggccttctttagtttgtatcgtattgtttgttggcggtttgcaattgctttgtctaggtattattggaaaatatattggaaaaatttttctggaaacaaaaaaacgtcccctttacattttaaaggagacagaaaaagatcaaaaataatttttgggaataaaaaagcagcgctggttgatgatcaatacccttttgttacatcgacttgatttcgaaccaattttttctcgtggataaaattgcggaagttatccataaagatggccatgaatgctttttgaaaatgtggggtcaacccggaaatatgcggggtgatcaacacattttccagtgtccatagcggatcatttgcgggtaaaggttcttcttcaaaaacatcaagagccgcaaatgcgatttctttttggcggagggcttctgtcaacgctacagtatctacactgggtccacgcccaacattataaaaagaagcggatgatttcatactattaaaaaaatggctattatagattcttgtagtttcaggtgtcaatggtaagatattaatcacacaatcagctttctgactttgttcaatcaactcttcaagtggataagtttccttgaaaccatcaacggcatgccccgttgtatttatgccgacaggttgggtgccaaaaaaatttaaggcctttgctaaagcctgcccaattttacctgtacctgcgatcagtatttctttatcagataataatgaataaggaataccattgggctgccattgtctttcagcctgttttttgatggcggtaaaaattcctctggattccatgaataataaagcaattaaatgatcagtgatcgattgtgcatgaatgccgctaccattagaaagtaagatgttcttttgggcaaactgtgctagaggtagcgtatccacaccggctgaaatggcttggacccattcaagagaagcattagccagtaactttccagcccattcttctttccagccaatcgtgattgcaacatttgaccagtcgatggaagttgcttcatcatagtggataaactgatattcatcactgatttcattaatttgtgtgataaattcatcacgaaattctctgctagataaaatatatttagtcatatttgttcctcctttattttagtgtatcaaagaacaaagaaaaaaccatgcgcaaagatctatgcatggttggatagttactagctttttaattggattttaggcgaacctttgacgccttgagtgaatagaaacagtgctgcgaataagataaatgttgtcccatcaaaatttggtacgaatagttggatcagcacactcaaaattgttggtaaagcagcactaacgattagtatcttaaggttttcaaaaaagctgtaagaaaaaagttttagttttgtatagatagttgcaataaatgtacccatgatcaatgtgattaataaatttaaaaatgtagggtagagcgctactaagaaaacaataagttgtagccaccaaggaatttgattgctgctcagtgtttcccgaatctttttgccatctaaattattaaatgctggttcattataagaaaattttaattgatttgtatctaagaatgatgtggaaagtcctgttccagggaaactgacaacaatttctttttttaatagtcccacactcaacacatttgcagtggcatctgaagcaatatcggtagcgttgcgttttccttcagggtcgaaagtaaaaatgatagagtcggtttgatagataaacccttctccttgtccattcgttgttaattgaccattttcaatcgaaaaattggggattttttgcgcaattttttgactatctcgctggaaatcctgaaagatatcattgacttgcaaagtgattggtacggctaaaataacggtagctccaagtagaaaaagaatcacttttgaaaaagcagcgtcttttacatatttgagatttgggattcgaataaatgcactttttagcatttgtatgattgtcatttgtttaactccttttatgtaactaaaaataattgtaacgaaggcagcaacagaacacaaggacttatgacagaaaagtccgattatctctaaagtgttctttgctgattaatgagtagaattggagatcgagtatggaaagtttaaaaaatgtgaaaaataaactacaagaaaaaaaattatgggagccgttaacgtatttaatttttggtggattaactactttggtcaatttagttgtttattttctctttagagaaatctttgattttcattatatgattgctaatgtgatttcttgggcagcttctgtgttgttcgcattcttcacgaataagatttgggtctttgaagcaaaaagtgaaacaaaaaaagaatcgtggcttgccttttggaagtttcttttcttcagagtcctttcgctgggattggatatggcttgtatgtatctattgattagcgtactaggaaccggtgattttatcgctaagcttgttacacaaatcattgtcgtcctagcaaactatgttttcagcaagtttctgatttttgcaccaaaaaaaattgataaaaagtaagcatatgttttgatgaaccactttttatctgataatgttacttatgtaatcactatcactgaggaggaattttttatgtcttacacattaccagatttaccttatgcttatgatgcattagaaccttacattgatgaagaaacgatgcatttgcatcatgacaagcatcacaatacttacgtcacaaatttgaatgcagcaattgaaaaacatcctgaattaggtgaaaaatcagttgaagaattacttgctgattttgattcggtgcctgaagacatcaaaacagctgtccgtaataacggtggtggtcatgcaaatcacagctttttctgggaaatcttggcaccaaatgctggtggtgaaccaacaggagccatcaaagaagccatcgaagaaacatttggcagctttgctgatttcaaagaagaattcaaaacagcagcaactggccgctttggttctggctgggcttggttagtcatcaaagatggtaaattagcgatcacttcaactgcgaaccaagattcaccattaatggacggtcaaacgccagttttaggcttagatgtttgggaacatgcctactacttgaaatacaaaaatgtacgccctgattatatcaatgctttctggagtgttgttaattgggataaagtaaatgatttttatgcgaaagcaaaataatcattaagtaagggaattatttttaatcagaataaaactatcccaacgataaaagaaagcacgttgcatcttagcatcagcttcgtgttaaccataagttctcactgctacctttgattcgttgggggtagttttattttttgaaacatattgctaacgctttcattttcagctataatattgaagacggaagcgtcttattttaattactggaggatttacacgcatggaacatggaaaagtaaaatggttcaataatgaaaaaggttttgggtttattacagttgatggcggagatgatgtctttgttcatttttctgcgatccaaggagatggctttaagtctttagaagaaggtcaagaagtcgagttttcgattgtcgaaggcgcccggggaccgcaagcggcagaagtcacgaaaatctaaactagaacaagctgagggggacctcagctttttttaatttgctattttcggccaaatttgttatcttcagtgtattataaatagattaaaaatgagggatatttgatgaaacgagtaattacgtatgggacatttgatttgctccattatggtcatatcaatttattgcgccgagcaaaagaacaaggagactatttgatcgtggcattgtctacggacgagttcaattgggatgaaaaacagaagaaatgctacttttcttatgaaaaacgtaaacagttattagaggctattcgctatgttgatttagttattcctgaaaaaaactgggaacaaaaagtttctgacgtcaaagagtaccacgtggatacttttgtcatgggtgatgattgggctggtaaatttgatttcattcaagaagaaacagatgccgaagttgtttatttagctagaacgcctgaaatatcaacgacacagatcaaaaaagacttaaaaataaataattaatacttaaagcataaaaggtatctttaaatggtgcctttttttgtacactatttccgtttttttcttaaaatttattagatgtttttcgttgtttattttgtcttagaggaaaatatgatatgatgtagcttgagttgtagcaaatgaatagaatttctttgagaatggatgaagaaagtggaaaaagaaataaaagttcgtagtactttggttacaaaggaatatgacctatacaaaaagaaatcagacaaagtgaaagcattattcaaattttatcatcgaaatgttccacgtttttgggcattaaaaggcgttagttttgaagtgcgtgcaggagagtctgtagggatcattgggataaatggttctggaaaatcaacgctttcaaatgtgatcagtggcattattcctccaacatcaggcacaatggaagtcaatggcgatacgtcgattatcgcaattggagccggattaaaatatcaattgacaggtttagaaaatattcgtctaaaagcattgatgtctggaatgaccaataaagaaatcgataaaaaaatggatgaaatcgtagcatttgccgatttaggtgattttattaatcaacctgtaaaaagctattccagtgggatgaagtcacgtttagggtttgccattgctgttcataatgatccagatattttgatcattgatgaagctttatctgttggagacgaaactttttatcaaaaatgtgtggataaaatcatggaattcaaagagtccggcaagactattttctttgtcagccatgctttaggacaagttgaaaaattatgtgaccgtacaatctggatgcattacggcgatttgcgcatgtttggtccgactgaggaagtaatggcggaatatcgcaagtttatcgactggttcaagaagcaaccgaaaaaagaacaaaaagcttaccaagataaatacaaagaaaatcaaaaggcatttaatctagaaaaattagctgaaaaaagccaagatgatagcttgctgaaagagcagcatctatctgaacaaatgattcagaagaaccttaaacgaactcctttaggtgagaagatgacgattccaactaaaggacttttgactcttgcgatagtaggaacactgttttgctctcttgtttctttcagtggcagatccattagctatgcgctaaagcatccggttgatgcaattgtacaagttttcaagtaaagataactatttctttatttagtttagatagaaaaggaagagtttagtgaaagaaattgctgcagtaataaaagaacaatttaatcatgcgggaattattttccgtatgtctcgatacgaggacaaagcaacctatcaaagccactatcttggtcttgcatggcaaatcttgaaccctgcgattcaaattggtatctattatttagtctttgggctaggagtcaatggtaatcggaaagtagatggcgtaccatttattatttggatgttgattgggatcacagcttggttttatatcaattcttcggtacttggagcgtccaatagtattcaccgacaagttggtatggtagccaaaatgaaatttccagtaagtatcttgccgtcaatcaatattatcagtaacttgtcatcttatatccctatggtagctattgtgattggctcgctcttatgggcgggagtaacaccgtccgtttattggttgcaatttatttattactttattgcgatggttattttcttatttgctttcggattattaaatgcgaccattacagtattgatacgtgactatcatattttcttacaatcagtattacgtttgttgttttatgtttcaggaccaatttgggatatcaataatcgaaatatgccggaatggttaattaagctattacgtttaaatcccttttattatttgattgaaggctttagagatgcctttttatcacgtggttgggtttgggaaaaaacgacctacaccttaattttttggggaatgactttaacactattgataataggtagtcatctacacatgaagtttagagcgcgatttgtggattatatttaagtataaaaaaactatttttcaattaatacaaaaaactatccgaaggaatgaaggggtctgttaaagcgtgtctcttactttccttaggatagtttttttagatgtgttaatgaatagggatgtacgccgttaaaagttaaaataacaaattctttatcgtttcatttttgttgcaatcgtgttaagattctgtaataaaacagaagcaagattgctgaatttgtaaaattgtggcaaaatttaaacgattacctaataatgttgtgatagaggtgtaggatgcgtttatatcaaaaagtaattttaggattgttgggcttggtggcagtaagtattgtcggtgtcactgtctatggaatgaaagtatacgatgatacgaataaaacgttcaataatattacgcaaagtgcggatcgtaagacgaaaaaacgtgaaacggcagtaagtattgaagatagagaacccttttcgattcttttgcttgggattgatactggagcgttggggagaaccgaacaagggcgttcagatagtatgatggtcgttacggttaatcctgccaagaaacaatcaacgatcgttagtcttgaccgtgatatctacactcaaattgttgggtatggcatgttggataagctgaaccatgcatatgcctttggtggcgaagcaatgtcgatggattccgttgaaaatctgttagacattcctattgaccattatgttacgattaacatgcaaggtatgcgagatttgatcgatgcagttggaggcatcgaagtcactaataaaatcgattttactctggaaggagtgcatgtgcctaaaggaaccattactttagatgggaaaaccggtcttgcctatgcacgcatgcgaaaacaagatccggaaggcgacattggacgtcaaaaacggcaaagagaagttgtcactaagatcgttaaaaaagtaatgagcttggatggcgtcagcaattatcaaaaaatattaaaagctgttgaaaagaattcaaaaacagatttgacttgggatgacatgatggatatcgctaccaattatttgcctgcgttcacgacaatcgatcaagaacaattgcaaggtgaaggccaaatgatgaatggggtctattaccaattattaggtatcaatcaattgctggaaatgcaaaataaattgaaagaacaactgaatcttcctaccagcgagactttgtctcaaggagatgaacatactgatggttatacaaactatcaattgtacgacgatacgaattacaatagtgaagaaaactcaaatgagaatccaggtgaaccgtcagacatttatgatgatggagccgggtatcaggaagatactgtcgattactctggatattaataatgaaaaccaaagcaaacggtcattgatcgtttgctttttacttttccacagatggaagttagaaaaatgtgtttcacgggattaaaattggaaaagattaagaaagcttaaagtgtagcagattctttctcaacaaaaaaatctttttgcgtaactgtgaaacattacagtggatgagaacgaattcttataattttctctaaggatacttggataattttgatttcttctgtttatattgaaaatttttggtaaaataagacggtaagcagtttgtaatgagaggatagaagagatgaagaatctaaaagataaagtcattaagaatatacgaaaagggcctgaggagcctaagacaaaatcttatcgcaaatcccatgttccctttcgattgaattttctcttttttgtgatttttggtctttttgttgcgttgatcgtgcaattaggttatttacaaatcgtcaatggtgataatattgagaagcaattgaaagcttcatccgtggtagaagtcaatggcagctctccacgaggaatgatttatgatgcatctggcaaaccgcttgtcaaaaatcaagccaatgcagccattacctttacaagaggaaataagatgacagctgaagatttattgaagactgcacaaaaactagctacattgatcgatattccaatcgataagaatctgacagagcgggacctaaaagatttttggttggcagatcctgaaaatttgaagaaagcgcaagatcaattaagttccaagcaaaaagcgctcggggcttctgatcagtatgcggcaactgtcgataaagtaacggatgaggatattgcctttaatgatgatcagttaaaagtagcttccatttttaaacgaatgaatagtgcacaatctttaagcactgtttatttaaaaaattctgatgtatctgatgaagaactagcaattgtggctgagaatatgaccgaacttcccggagtttcgactggcacagactggactagaaaaattgttgaaggcagttcattggcaagtttgatcggaactgtgacaacagaagaacaagggatccctgaagaaaatttggatgaatatctagcgaaagggtatgctcgtaatgatcgtgtaggacgaagttatttagagaagcaatatgaagaagtccttcaaggatcaaaatcaaagtctcaaatcacattagacaatagcaataatattgaaagccaaaaagaaatctatgcgggctctaagggagataatcttgtactgacgctagatgccaagttccaaaaagaagttgatgaaatcttacaagataactttaagtctttgatggattcaggagctgcagaatactcgcctggagtctatgctgttgcgatcaatcctaaaactggcgggattttggcaatgtcaggttatcaacatgaggcagaatcaagcaaattgcaagagaatgcaatcggaaccttcatcaatgcttttgttccagggtctgtagtcaaaggtggtacgttagcagctggttgggaaaatggtgtcttgaatgggaatgaagtcttatatgaccaaccaatccgcatcggctctgatgtcaaagcttcgatctttaacccgacaggagcaaacaaccgcaatttgtcagctgaacaagccttagaagtttcttccaactcctacatgatgcaggttgctttacgcttgatgggcattgagtatcagcctggaatttcaattccaacagttgatcgtcaaacagaagcctacagtaagctgcgtacagcctttgcctcttttgggatggggacgaaaacagggatcgatcttcctggcgaagcaacagggatcagcacacctgtcgacaaattagatacggtcagtgatggcggtaagatcctggacttagccttcggacagtttgatacctatacgacattacaattggctcaatatgcagcaactgtggccaatggcggccaacgattgcagccacatatcgtttcgggtatctatgggaatgatgaaaccggtggtttaggaagcttgaaatcagcggtagaacctaccgttttgaacgaagttggtttaactactgatcagatgaaaatcattcgaaatggattttatgatgccgttcatggaacagatgcttgggctacagcaacaggactagcttctgctaaaatggaactttctgcgaaaacgggtactgcggagacaccgattgtcgatgaaaatggcaaaaccatcaatctggtcaacctaaatattgttgcttatggaccaagtgatgatgcagatatagcagttgcagtggttttaccacaggttaaatcttcaactacttcgcatccaaacgtaaaaatcgtgaaagaaatcatggatgcttactatgatttatatatgaaataagcaaggcataatcgttgaatgagtaagagggagttgatgaacggttcgttcgctgatgattttccaaatcagtgaaggacggttcatcaactttttttatagcaaaatactttctatcggaattattaagagattatcaataattcggagagaaacctcttttttagtaagtgggtcttgctatttttggttgaatggcatagaatactctcggtcaacaagaaatgaaaaagcaggattggtttcaatcatttttcattttaactgacttctattataattgactagaattgcagggggctatcatgacgaagcaatgtttaacgaaacaagaattgatggaacgcctaggggagttctcaccagcagaaaaaaaagaaatccgcgaatatttgcaacggaagaatccattgctgtttcgcaaatttgaacgcatgaaacatgaattatttcgtctagaatcaagacggattcaatgtgaaatcgaaaaaaatgaaaaggagttgaatcagctcgatcataagattctcatgaaaaaagaacattttcttgagttattaatcgcaattcgaaagaaaagaggataatggatggaatttattgaacttatcatcatcatcgcgatcctcgtgaccttttcaaatattgtcagcaaaatactgccatcagtaccgattttcttcattcagattatcttaggcattctgctaggattgactgaaatgggacaagaaatcgcattcgaaccagagatgtttctagtgatgatcattggaccgctattgtttcgagaaggagaacgagccgatgttccggaaatcttgaagaacagtaagatcgttttgtttctggcctttggcggtgttttgctgaccttatttgcagtgggaacgacactgcattggctgatgccatcgattcctttggctgcttgttatgcttttggcgctgccttaggaccaacagatgcggtagccgtctcatctttagcgaaacgcttaaaaatttccaagaacatcatgcatattttagaaggcgaaggtcttttgaatgatgcttccggggtaacagcgctccaatttgctatcgttgctttagtcactggtagcttttctgttatgggggctggctttcaattgcttttttcgagtattggcggcggcttgattggttacttgatcgtttggttaaaacggcggatcattcgctttattgaaaaaatatctgcccaagatgtcactgtttatctgttgatcgaactactattgccttttgcagcctacttgattgcagaaatggttggagtatctggtatcattgcggcagttgttgccggtgtagcgcaagcacaaagaagacgacgagtctctttgttcgatgcggaactagccaatatctctgaaagtacgtggtcaacaattgtatttacgttgaacgcccttgtttttttatttttagggattgaactttcgcaagtattttcacccatttgggaaagcaattcttatgcaaacggtcatttagtcttgaccatcgtagtagtaacactcgttatcttcttcattcgtttcttattccttcttttttattatcagtttttacaatcaaaaaaaatcgtggacttgaagcaagtagctttgttgacctttggaggggtcaaaggaacggtcagcttagcggcaatttttatcttgcctgtaacgatcaacggtgaccaatttgaagcccgcagtttgctcttatttttgacggcttgtgtcatcttagcgactttagtgatcagtgtacttgtcttgccctatttggcagatggtgaagctgccgaatctgttgatttcaatcagttgctgattttagaagaagtcatccagatcttggaagaagaagagaaagaaattacggatgccaaagagcgcttagcgacagatgcagtaatcaatacttatgaaaatcgacgctgggaattgtatcgcaatagtttaactgattctgaaaagcaagagatacaggaaattcaaggattgattctatccattgaacaggatggtttggatgaagcctaccgaaaaggtgaggttagctccaatgggtatcgcttttattcccggttcatttcgcagcagcagcattcgttagcaaaacagttcttgtcttttttcagtttttggcttttgatcattcaacgttttgtacggatcatttttcatcccaagctgttttggcagcgccagcagcagctgaaggatgcattgaaacaaagagatatatcagaagtacaaaaaatctatatcaaaaacagtgattatatttttcatagtttaagcaacttagaagatgtctacgattcatctttgatcaacttctttatacgtcaaagggaaatgagcttaaagcgttttgagcataataacttcattgagactatcatgattgaacaagaaccgatttttgtcaaaaaagttttacgaggctattatttagaacgaaaaacgatcgatgaatatgaggtagccgaaaaaattccaacgatctctgcaaacgaatatcgacgcaacgtaaatctcttggaatcttatgcgatggctcgcgcagatgaacagccgaaacagcgaatgtttcgtagataaaacaacaacttcttcgtctcagggttgagatggagcggttgtttttttcttttttcttaaagaccctgtcatgcttatgtggtacaatgggcgaagaaaaatagatctcaggagggattctgtgaaagaattaaaagtaagtgagcttacaaaaacttacggcgataaaacattatttgatcagctttcttttctgatacatgagaaagaccggattggcttgattggtgtcaatgggacaggcaaatcaagtttactgacgatcttggctggaattgaagccggagatggcgaccgtccctctgtttttaaaccacaagattatcgaatcggctttttggcgcaagaaagtcaattaaaagaagaattatcggttgttgatgcggtcttccaaggaacaagtccattaatcaaaaccgttcgtgactatgagaaagctttgattcagctggaacaaaatggctcagatcctacagtgcaagctgcctacagcagagcagaagaagctatgaataaaacagatgcttggaatacggatacaacggcaaaaatcattttgcagaaattagggatttcagatttaaaacaaccagtcaatgaactttcaggtgggcaaaaaaaacgggtggggttagcgcaagtgttgatcgatgaaccggatttactattgttggatgagccgacgaaccatcttgactatgaagctatccaatggctagaaggctatttgaaaaactatcgcggcgcactgatgatggtcactcatgatcgctattttcttgaccgggtagccaatcgcgtgtttgaactctcttttggtaaactttatgaatatcaaggaaattacgaggactatttattagccagagcagaaagagaacgtattgaagaaacccaagaagaaaaacggcaacagttatataagcacgagctggcatggattcggacaggcgccaaagcgagaacgactaagcaacaagcgcgaattgatcgtttcgacgatttgaaagagaatatgaaccaagtcaagcggaatggagaagtgcagattgatgttgcgacctcacgtttaggtaagcaagtgctggaaatcaaagaaggtagttatgcaattgaaggcaaaccaattctatctcaatttgatttattgattcagtcgcgagaacgtttaggcattactggtgagaatggtgcaggtaaatcaaccttgctgaatgtgttggcgggacgtctctcattagattcaggaagacggattattggctcaaccgtcaaattagcttattatacgcaaaccaatgagacgatggatccggaacagcggatgattgcttatttacaagaggcagcagaagaagtagaaaaaacagatggtgcccatgtcagtgtagcggaaatgctggaacaatttttgttcccccgtttcatgcacggaacaaagatcggtaaattatctggtggtgaaaaacgccgcctatttttattgaaattattgattggtcaaccaaatgttctattgttggatgagccaacgaatgatttggatattgatacattaactgttttggagaactatcttgaatcatttcctggtgccgtaattacagtttctcatgaccgttactttttagataaagttgctgaaaaattacttatttttgaaggcaacgcgcaaattgttcgcttctatggttcgataaacgaatatttacaaaagacagcaacgaaacagggcacaaagaaaactgcagcctcacaacctgacaaagggctacaaagcaaatttgtttccgaaaagccagtcaaaaagaaactaagctacatggaacaaaaagaatgggcaacgatcgaagatgagattgctctgttagaagaacgagtcgacgcactaactgaagcgatgaatcagcagggggatgactttacgaaattacagcagctccaagcagaagttacagaaacagaacaattgttagaagaaaaaatgacacgctgggaatatttaagcgagttttcagacgactaataaggaggcccattatggaacaagcatatcttgatttagggaaaaaaattttagaaacgggaaatgtcaaaggggatcgcacagggactggaaccaaaagtatttttggtcatcaaatgcgatttgacctctctcaaggatttccattattgacaaccaagcgcgtaccttttggtctgatcaaaagcgagttactctggtttcttaaaggagataccaatattcgattcttactgcaacacaagaatcacatttgggatgaatgggcttttgagcggtatattaaaagtgaggactatacaggtcctgatatgactgattttggccgtcgctcattaattgatgaagaattcaatgccagctatcaagaggaattgcaaaaattttgcgaacgtattttaaatgacgaagcatttgcagaaaaatttggtgatctaggtcatgtttacgggtatcaatggcgtcattgggaaactactaaaggggaatttattgatcagatcaaagaagtgattgaaatgatcaaaacaacgccagattctcggcgcttgattgtttccgcatggaatccagaagatgtgccgtcgatggcgctgcctccttgccataccatgtttcagttttatgttcatgaaggtcgactaagttgtcagctttatcaacgaagtgccgatgtttttttgggggtgcctttcaacattgctagctatgcgttattgactcacttgatcgctcacgagacaggactccaagtcggcgaatttatccatactttaggggatgcccatctgtatagcaatcatatggaacaaatgaaagagcagctttcccgaacaattcgttctgcacctacgttgcacttaaatcctgagaaacaatcgatttttgactttgagatgggagatatcacgattgaaggctacgatccgcatcccacgatcaaggcaccgatcgctgtctaacttattacagttgggagtgagaagatagatgacaaacgatttacagcggggaatcgtcgcaacgctgcatattacgtcaaaagataccatttcattatcagatgtagaaaaaacaattacgatccttcgttcttatttttcgcaagtcattttagcagtttctgaagtaacgaaacctgaaatcaagcggtatttatggcagctgccgccccagatctatctctttgaattgccagcagtcggtgctggtccagcacgtcggcaagctgtggcacgcgctggaaaggcatttccgcaactcgcttcctttcaattatgtgattttgatcgtttgatcacttggtgtgaggaatacccagatgaactgtcagctttgagctgtcagccgtttcctacgaacactttctgtatattaggacgtacaaagaaagccttcctaagccatccaactgcttggcagcggacagaaaagctggtcaatgaaattgcagcggaagtttttcatatcaagggtcttgatattaccgccggcagtgtcttgttttctgcggaattgattcctttactagtatccgcagattcttcaagatggacggatggcgaatggccaaccaaagtgaagcatcatggagggcatattttttatcaagcgtgcgaaggcttgtgttataaagaaagaaataccgatcatctgcaagcacagcctgcttatcaattaatgagaaggctgcagattgcagcggctattgcagattcactttatctagaaagggagttttgaaacatgttgattgcactttgggcacaagacaaaaatggtttgattggagaaaacggcacattgccatggcatttgccaaacgatctgaaattcttcaaagaacaaactactggaaattcgctcattatggggcgaaaaacgtttgagggcatgaagaaaaaagcattgccaaatcgaacaacaatcgttttgaccagtgacacagcatatgaagcagaaggcgtattagttatgcatgatcgacaagaagtcttggattatactgcacagcaagatcatcctgtgtttctaactgggggttctggagttttcgaatcgatgatcgaagattgcgatcagttgtatcgaacagtgatcgacgagacatttaccggagatgtctactttcctgagatcgattggtcaaactggcatttggataaagtcatagaaggcgtagtggatgaaaagaacatctatccgcaccggtttgagttttatagtaagcagaaaaaataaataaggcagctgttacaacatatggttgtagcagctgccttatttaagtaaaagtgggttggatcatgtaaaccaaagaacggaaaaatacattagtccagctccgagcataacaaacaaatgccaaaccacatgcatgaagcgtacggatttgatactgtagaataatgcgccgacggtataagagacaccaccgcttgttaacagaaaggtaccccaaaaacccagtgaagcaatcaatggtttaaatgcaatcacgcagagccagcccataataatataaattagtgtggatatttttgaaaccgtctcttttttatgcagtgtgagtgacttataaacgatcccgctgatggctaacaaccaaatcaaaatgaaaagtgtccagcccaaccaaccttgaatactcagcaagcaaaacggcgtataactgcctgcgatcaataaaaaaatcgaggcgtgatcaaagacttggaaaactttttttgctcgtgtgaacatcaaactatggaagagcgtagagaataagaataacaaaatcatcatagagccataaatcgcataggaaatgatgtgaataggggaatctaatcgagcccctttaatcaaaagaataacgagtccagctatacttaatccaaatccgataccatgggtcaccgcattgagtacctcattcagaatcaagtagcgtcgtgtaaatttcatatgatccatcaagcaccttcccttcgaatttaaataagatgaaaaaattttttctctctgttatactgattataaatggtctatggttattttaccacgaaaagagacttgatttaaagagagagtgaatgtatgatggcaaagcttaaagttgtaacggattcctcctgtacgatggagccaaccgttcgagaccaattgaatatccatgtagttccgttatctgtaatgatcgatgggatggtttatccggatgatgattcattgcccggagaacgattcatgcaaatgatggcacaagcaaaagaacttccaaaaacgagccaaccaccgattggccattttgtggaactgttcgatgaattaggaaaagatggtagtgacgttttatcgatacatatgacgaagggtctgagtggaactgtcgaagctgccagacaagcaagtaatttgtcgaaagcaaatgtgacagtgatcgatagtgatacgacagatcaagcattgtcgttccaagtgattcgggcagctcaattagcacaagaaggtaagacattagctgaagttttgccggaagttgacaaagttcgagaaaataccaaattatttattggtgtctctacattagaaaatctggtaaaaggcggtcgaatcagtcgtgccaaagggttattatccagtttattaaatatgaaagtgattatggatttcgaccattcagaattgattccaatcgtaaaaggacgcggtgtaaaaacatttaataagtggtttgaagaattgaaagacgaattgaaacgcatgccgaatgtgaaacaaatagggatctctcatgcagaggggttagagatcacagaacaattcaaaaaagaattgcaacaactcttcccagaaatgaatattccactacttcataccaccccaatcatcgctacccataccggcaaaggcgcattcgccattacgtattacaccgaataattttaatgacagtatccaagcgattcgtaaacacgaatcgctttttgctgcgaatcacaatgattggcttgcgaagcaagacagaattgatgatgagcagtactaggcgagctgagcgagcgtagtaaccttgaaaagaatcacaaagactggcacacgaagagtgacagagcagatggtgagcaacggcgagccaaacgagcgcgatcttgaaaagaatcacaaagacttgcacacgaagagtgacagagcagatgatgagcaacggcgagccaagcgagcgcgaccttgaaaagaatcattatggttgtcactcgaaaaatgacttttacattctttttaatgtaagtttagaagcaactgcagacgaaacaatgagtacaatgagtagccaagcagttgatgaagcgggactcgaatcaagcagatgggtagaaattgcttcatacttcgctgctcttcgttgattgagtttctcgtcaatcaaaacatttcgactatgaatttaatgagaattttgataaaatagcttagattataggttaggagattgaagatccgtgaagtggaaaaaagtagcaatttatctttcagttgtattgatcgtagctttaggtactggaatgctcggtcattttttgattccaaaagcgcaaccattgctcacaccagttgcgagaacggcagaagagggaaagaccaaaaatgtgatcaattacatggccttaggcgattcgctgactgaaggagtcggtgatgagacgcaacaaggaggatttgtgcccatcgttgcagccgatttgcaagatcggtatcatttagcaaatgttgtgacgacgaactatggaattgctggagagcgcagcgatcaaatcctgaaacgagtgaacaaagacaaagaattgcgcagtgacctaaagaaggctgacttgattacattgaccgtcggcgggaatgatgtattaaaagtgattcaaactaatttttttggtttgagtgtcgattcttttaccaaacccatggccgactatcaagaacgattagtagagatgtttgagcagattcgtcaactgaatgaaacagcacccatttatgtgttagggatatataatcctttttatttaaattttccagaaattactgatatgcaaacgattattgataattggaacaaagcaacagaaacatttgtcaaacaacagcaaaatgcttattttatcccaatcaatgacttgctataccaaggactaagtgacgaagttgggatcgcagatacggattcttctgaagcaggcgcttcaggatcagcagaaacttcggataccacaacttccaccaccaacggtatgaccggtacttcagaaactgggggaacaaaagtgaccaacaatgtactgtatgatggggatcgtttccatccaaacaatctagggtatcagctaatggcgaatgctgttcgtgatgaattaatcaaaacccaaaatgtttggctgatgaaggaggaaaaataatgaaacaagaaactaatgatgtggataaaaaaagtccaatcaaaaaaatgaattactggaaaattgcttttctagttttagtaggcattctgttgggaacaactgtcttttttgcttcacgggtgtttcaacaacgtgaatctgggatctcagaaagtgcagaactagtcaaacgagacggtaatcctgttttgaccatcaacagtaataagagtcaagtcaatcaattgatcgatttctatttaactgattttcagaaagatcaagaagtaaaatacaatttcgagttgagaaatgaggcactactgacaggtcaatttaaagtgctgaactttccaatcacattttacttatactttgatccttatgtcaccgaagaaggcaatgttcagttaaaagccaaaagtttatcaattggtactttagatctgccgaccagtgaagtgttaaaaatgatcaagcgcagcttcaagtttccagagtggatcgaggtcaatgcggatgaacaaattattttgattcgcttggatcaattccgcatgcaaaacggcttgtttatcaaagcgaataaaatcaatctagtagatgatgagatccaaatgagtctctatctgccagcagaaacggaggacaaataatggaacgagcaatttttgcgggagggtgtttctggtgtatgattcagccttttgatgagttagaaggagtacagtccatcttttccgggtatacggctggacacacggttgacccgacctacgaggaagtaaaaagtcataaaaccggtcatacagaggctgttgagatcatttttgatccagaaaaaatcagttttgaggaattattgactatttattggcaacagacggatcccacggatgcttttgggcagtttgaagatcgaggagacaattaccgaccagtcatcttctatttcaatgaggaacaaaaacaaaaagcagaagcaagcaaagccgctttgcaagcatcgggtcgctttaatgccccaatcgtaacgagtatcgaacctgcacaacctttttatttggcagaagaagagcatcaagaatactacaaaaagcatcctgaaaattttgctcgcaatcatgcgagacgagcagcttttcttgaggatcactgggagaatacgcatgcgtaaaagtttttatacttatttaatggccatcaaagggcctagtcatactgatgaggcacagatctttgcgacacatgcaagtcatgatattcaattcccaaaacataccgacgattatgatgaagtttcttcttatttagaattgaacgtcgattatttgccttctatggatatttttgatcgtatttgggaacagtatgtggaggataataaataagagagagtggagtggaaacttcctctctttttacactagaggctaaaaaattaatggacagaaaggtgtctttctatgaaaaatgtttcttttcaccgttatgtgatctcactgatttgtgtcgcgatcctctcgggaggcggtgtctacatttggcaaaaaagtacggctgcaacacaatccccacagaatcagcccacagtggcgacatcaaatgaactggaaaaagttcaaacgctttttgaccaaattcgtgccaattattaccaagaagtagatgaggatgtcttggtcgaaggggcattaaaaggaatgaccgatgcattaggtgatccttatacaacgtatcttagtgaatcagcagccaatgaattggatcagtctttatcaagcagttttgaaggaattggcgccacccttacccttgtcaacgactatccagaagtggcacaagcccctatcaagaactccccagctgagaaaaacggtttgcgtctaaacgatcgtattttgaaagtggatgggaaagaaacgaaaggcctgtcattaacagaggtcgtaaacaacattcgtggcaaaaaagggaccacagtcaagttgacgatccaacgggaaaaagagacctttgacgtatcgattacacgagatacgattccagtggatactgttcatacagaccttgatagtgagaaaaaaatcgggaaaatcgaaattacgacttttggtgaaagtactgcctccgaattaaaagaaggaattgagtcactgagaaagaaaggagcaaaatcatttattctggatgtccggcaaaatcctggtggacttttagatcaagtacagatcatggctagcatgtttttagaagatggaaaaacgatcgttaagtttgcagatgatagtggtgtcataagtgaaacgaaggcaagtgctgctcttgatgaaggattcaaagtcacagaaccggttgtcgtcttggttgatggcggcagtgcatcggccgcagaaatttttgcagctgcgttgcaagaatccgcagatataccagttgttggtacagaaacctttggtaaaggaactgtacaaaatgtaaaagaattaggagacaatagtgagttaaagatgacggtcatgaagtggctgacgccaaatgaagaatgggtcaatgagcaaggtgtaatgccagatcatcaagcagattttcctgagtatgcctatttagctccattaccaagagacaaagaattgaaagaagggcaaagctcagaagcagttgatcggttgaatcagtttctttctgcactaggttatcggaccaccggagatacatttgaccaaaccaccgtatcagccgttcaagccgttcagcaaaaagctgagctggaagtgacagggaaagtgaatgccgaaacagcacaagcaattgagaaagctgtgacggatcaattaaaacaagaagatcatgcttatttgaaagctgtcgagttattatcaaagtagtaacaaagtaaaagaggagggacatcatgcagcgaagaaaaatctggatcgatcgcttttggttcatcattaaatacgcgattattgcattggcctctgcattcctgattcgtgcattcttgctgatccctgtaccggtgggcggaaattcaatggaaggtaccttaagacagggtgatatggttttgatcgagaaaatctcacccatcaagcgatttgatgtcgtcgtttttcaaatgccggatggttccacctatattaagcgagtgattggattgcctggtgaatccattcgttacgaaaatgatcaactatatgttaatgatcagccggtagatgagaatttcctagtgaaaaatcgaaagaatgatcacgaaaatgtctcttatacgaatgactttgatctacagtcattgttgggcgttgaaaagctggggaaagacagctatttcgtgataggtgacaatcgtcgtgcctctaaagacagccgatcatttggtgccatttctggagatgcgattttaggaaatgctcgttttgtttattacccactaacccatatgcgctttatataatgaaaaacaaaaacatcatttattcatatttttgcgtaggtatcgctactttcaaaaaatatgagtagatgatgtttttaatagcagctagtatttttctgcagaaatcaatgttgttggatcctttgcttgataataaaatgctgttcttgtgtcatgttctttacataattatttaacacttactttgttgtttttcgttattctattgaaacgaacaagcaagaaataattttataagtaagcgttgacagtgccattttaagctgatatactttggctgtaagttagaaaaaggaacgagaaatagcgccgcagctgtttcttgagttatgttactgagacgatcaggcagaactcagaatatatatcaagtacactttcttttgtaaagtttatttgatatttattctgagttcttttttctggaaaggagaaacgaatgaaagttaaaaagattatcaataataatgttgccttagtggatagaggagggcatgagtcgatcatctacttaacaggagtcgcattcaagaaaaaagttggccaacatatttctgactctgaagtagaaaagacctttgtcttagatagccaagatcgattagagcattttagctacctcttatctcgcgccgatgatcaattgatcctgcttgtaaacgagctcgtacaatatggagaaaaagaaatcggcaaaagtgccaatgattatctttatttagctttgttagatcatttatcctttgcattgaaacgggcaaaaaaagatcaatatttgaggagtccattgacttgggaggtaaaaaaattctatcccagttattacaaaattgggttagaagccttggaaaggatcaatcaaacctttcaagtcgattttcctgaagatgaagccgttgccattgccttacattttgttaacttgcaggaaacgaaagcaaagtttgatgaacaattagctgatatggaaacgttgcgggatatgctgaatattatcaaatatcattttacgattactttagatgaaaacagcatgaattatatgcgtcttgtgacccatctccagtatttcatcgaacgattgcggaacaaccagacctattccgacaatgagtctcaactttataaacaagtgaaagcaatgtatccggaagcatttgccgcggttgaaaaaattgagatctatgtcaaaggaaagttcaacagttacctgacacaagaagagtacacctacttaatgatccacatcaatcgtgtaacagaaagaggagaatgacatgaatcaataccatgatttcaacgagcaaatcatcaaattagttggcggaaaagccaatattcaagctgttgtgcactgcatgactcgtcttcgttttactttaaaagatcgctcaaaagcagatacaaaaaaattgcaagagctggaaggggttattgatgtggtaagcaataatgttgcttatcaaattatcgtaggaacccatgtaaacgatgtttacaaagatttaattgaccaactgggaatgtcaggagacgaagcagaccagtcaaaaacgaagaaaaatccgatcaaggcgatgctagatgtgatttcggaatcaatgaatcccattttagaaccaatcatctgtgcaggtttattagccgcatttctttcaattatttcattaaccggtttgatttcgacagatagctcaacgtatcaaatttttgatgcattacggtcggctgttttttatttcttacctattttaatggcgatgagctgtgccaaacgattaggcgccagcccttatctagcagtggctttagcagcaaccattttatctgaaccgatcaacaatgtttcaggattgagtttatttggtattgggttaccacagatcacttattcaaatagctttatcccgattttattagcagtatggttcatgggctatgtaacaaagtttgccaaaaaagtcattcctaaaagtttgcagtactttatgtctcctttagtgatcatgctgattactttgccagccacactcctggtttttggtccattagggttttatattggggaaggcatcattggcttcttcaatctattgatggacacgataggtagctggtttgtgatgatgctctattctgcattacagccattcatcattatgttaggcgccggcaatttcattatgcctgttgtggcttcattgattgcagcgaatggatatgatccagcgtttatctcatcatgtacaatctctgacatcgctgtcggcggagcaatgcttggatacttcttgcgtgctcgcaacttgaaacaaaaacaactatttgggaccgtgactttatccgccattttaggagttaccgaaccagccatctatggtgtattcgttaaattccgtcgtccgtttattgctgtgatgatcggtggaggtttagggggactgttcgccggtttaacaggtgtcaaagcttattcaattgcttggggattatttggattacctgcctatattggcgaaggcgacttcatgaatctttggttaatggtggcagcggttgcgatcagttttattggtgcgactatcgcagcctatatgttagggattccagtagaaagtgatgaagtaccggcggttaaagagaaagaacaacctgtatcttctgaaatgattcgttctactgctttaaaaagtgtagtggaaggagaagtggttcctctcaatgaaatcaatgaccaagctttttcaactggtgctttagggaaaggaatcggtatcaaacctataagtcatgtgattcattcgccaatcgatggggaagtgctaacagtctttcctaccaaacacgcgattggtcttcgcagtgaccaaggcgttgaggtcttgatccatattggtatcgacactgtttcgttagaaggcaagtattttacgatgaatgtgaagcaaggtgatcgtgtgaggacaggacaaccaatcggtgaagtagattttgaaaaagttcgtgaagccgggtatgatccaacgactattgtggtcattacgaatacgaatgattttcttgatgtgatcccaacatccaataaccagttggtaaagtcggatgatttactaaatattgtcttgcaatagaaaccgtaataaagaagatagaaaaggtgagcagatgaagttaagaaatgattttttatggggcggcagcattgccgctcatcaatgtgaaggtgcttggcaggaagatggcaaaggcccagctattatggactatgtcacagtaggcagctatgaacagcctcgtgagatcgataaagaacttcttgctaacaaggtttatccttctcatacaggcatcgatttttatcatcgttatcaagaagatattgctttgtttgcagaaatgggattcaaggcattacggatttctattgattggtcaagaatttatcctaaaggggacgaagcagaaccaaatcaagccggtatcgatttttatcagcgagtcgttgacacgctattaaaacatggtatcgaaccgatcattacgctctatcacttcgaaatgccgattcatctagtgacagaatatggttcatggacaaatcgcaaagtcgttgatttctatttgcgcttttgtcacacgatgtttgaagcattcaaaggaaaagtcagatactgggccacttttaatgagatgaaccatatcgattctcaaagtgaggctagtgatatctttacctatatcattgccggattaaagtactctgaaatcgatgctaaggcccagacattagccatgattggctacaatatgacgcttgcaagttgtgctgctgtcaaaatgggacatgaaattgatgaaaacttccaaattggctgtgtttttggtatcgagccagtctatccagcaaattgtgatcccgtcaatgttctaaatgcctataaacaaatggatcgtgacttctatcagatcgatgcaatgtgcaatggtctgtttccccaatacaaactggaagaatatgcagatcaaggcataaaaatcgtgatctctgagtcagataaaaaagtgtttgctgagggcaaaattgattttattggcatgaattactatgcgtcttctgtcgcagaatatgaaggtgcatcggaaggaaaaagtgctttatttggcggtctgcaaaatccttatttggaaagcagtaagtggggatggacgattgatccgattggcatgcggtatttgttaaattacacttatcgaaaatacggattaccaatcatgattactgaaaacggactaggtgcagtggatgaaatcgcagaagatgggcatgttcacgatgcgtatcgcattgattacttgcacagacatgtcgagcaattgttgctgtcagttgaagaggatcaggtagactgtatcggttatctaacgtgggcgccgatcgatttagtcagtgctacgacaggtgagatgaaaaaacgctatggatttatctatgtcgacaaacaagatgatggaacagggtcttatatgcgtaagaaaaaagattcctttgagtggtatcggcaagtcattaactccaacggtgagagtatcaaaagggagaatcatgagtaaaaattagttttctattcatttcatttgtattttttttcatcaaaacttgtatcgatacgcactttaataagaaatgatggcgatctagaaagaagtaaattctttctagatttttttgttttcattgttttcataaatcagtatgagcgatgggaacctcttggtttcaaaaaggtttgatcttttcgattttgttgatcttagtacttagctacgatacatagctgcatttcgttttatttctattacttatatattcaaacgaggtagccgcttgcttgagcaaatgtgaaaaaaatgttctagaaataacgataaaattttttacagtgttgtaattctgtcagacttttggcattttttcttcaaaattgataagatgatttgagtaaaagacgtaaaatgaagtataattttaactaggctgaaaattggtctttttctcaaaaaaagttggcttcctacatcctgacactcagctagctacttttagctactttttcctaattttagctactttcacaagccagcaagttctcttggactgacactgagtgacagaatgaattgagccgtggaccaactcccctcatggtatttttaaattagtctgccaagtgattctagtgaatgaattaacaaggaaaggctgtggaatcagccaaataatggcatataacagaatagtcagcgtagttgggcagtttttggccattctttggatatttgctggactgtaagagcaggttgaatgagcaaatcaccactacaatacgcgtctcataggtatagttgcaggtgattggcaggtagtatttccaattaaaccaattcgtgttaaaatgcgtaggatactcggcaatcaggaaattttctcgattcgtccgatacttttaagagaaagccaaaacaatgtctgaaaaagactggtatgaaaggaaattaattatgagtaccattcaatggtttccaggccacatggccaaagcaaaacgtgaagtaagcgaaaaactaaaatttgtcgacatcgtgtttgaacttgtagatgctcgtctccccgtttcttcaagaaaccccatgctggatcaaattttacaacaaaagccacgcttgatcttgatcaataaagcagacttggctgaccctcagcaaacaaaactctgggaaggctattttagaaaacaaggtttcttagccatggcgatcaatgctcaggatagtcaaggaatcaaaatgatcgttcctaaagcaaaggaagttctgcaagaaaaaattgctcgtgacaaagctcgtgggctcaaaccacgtccgataagagcaatggtcattgggattcctaatgtaggaaaatcaacattgatgaatcgcttagtcggcaaaaaaattgctcagactgggaataaaccaggtgttaccaaagggcaacaatggttgcgttttggtacagaattggaattgctggatacaccaggaattctctggcctaaatttgaagatcctgagattggcaaaaaattagctttgactggcgctatcaaagatcaactcatccatttagatgatattgctttgtttgggttagacttttttgctcgctactatgaaggaagaattgctcagcgttattcactttctgcggaagaagaacaatgtctagcaccagaactattgatgaagatcactgaaaaacgtggctacaaagacaattatgatcgcggtagtgaattagtcgtttttgatattcgacaagggaagctgggaaggtacacattagatcgttacgaggagttaggtgaaaaagatgaaagagccgattaaaactatcaaagagcgactatttgccgaggaggttgatccggcttatgtggctcaactgatggcagacgaacgctctggtgtccaaaagctgattaccaagtatcaaaatcagcagcgtaaacagcgacaaatgcaagaaaaatatgcagaaatgtctgtatttgaacaagaactctatcagaaagggcttcggtttgttgccggtttagatgaagtcggccggggaccgttagctgggcctgtagttgccgcggcagtggttttaccgaagaattgcgggatcattggcttgaatgattcgaaacaactttctgcgaaaaaaagagaagaattatttattgagatccaaaataaagcggtagcgattggcatcggtattgcagatcatgaggaaattgatcgtgtgaacatttatcaagccagtaagaatgcgatgaaacgagcgctagctgacttatcgattacaccagagcatttattggtggacgctatgacgcttgataccgatattcctcagaccagtctgatcaaaggggatgcgcggtcgatcactatcgctgctgcaagtatcatggctaaggtatttcgggataatttaatgaaagattatcatggtgtttttcctcattatggatttgatcaaaatgctggttacggtacgaaaacccatttagaaggattagctgcccatgggatttgtcctatccatcgcaaaacgtttgcaccagtaaaacagtatgtaaaataattcatcaaacagcctcatttttacgaatcttattagtgagattctttagaaatgaggttgttttatgtactatcaggaatgtacgcccttcgataaaatcctccttcgcttgtcatttgtacaaggagtcggtattcaaagtcagtggcaggtggtcaaaggctgcctcgcacaagaaaattggactataacggctgaagaagttattcaaatgacagggatcacacgcaatattcttcgttttcaacagtcgtggcatcagttgacagagagtgacttagcggaaaaaatggccgaccagtcatttatcacctttttttcaaaagactacccacctgcactgagaaaaatcgctgatccaccattgatcctcttttacgaaggaaatctgtcattactccaaaagccttcactggctgttgtcggtgctagacaagcgacaagctacggtcagcagatttgtagaaaaatcattccggaactagtgaaaaagaagtacttgatcattagcggccttgcccagggattagatagtttcgcccatgaagcagcgattgaaagtggtggacaaaccattgcagttataggaacgggactggatcagtgttatcctaagagttcgcaacgtctttattctcagatcaagcaggaacatttgctggttagtgaatattcgcgaggaacattgccgcataaacatcattttcccatgcggaatcgactgattgcgggaatcgcacaggcagtttgtgtgattgaagccaaagaaaagagtggctctttgattactgcacagttggctttagaaaatgggaaggatgtatttgccgtgcctggagaagctttgaccgatcgatcagaggggtgtcatcagttgattcaagatggagcaaaatgcacgctgacagcagaagatatcttagaagaattgccttaggcttttgaacttatgatgatcctttcttgacaaaactttttctgaaagctatgataagctacgatttggatgtttggaaagcaagtggattgtttgccgaatatattatagtaggaaaaaatgaaggaaggagccattttttatatggcatataaatatctagtgatcgtggagtcgccagcaaaggcgaaaaccattgaaaaatacctcgggcgcaactataaagttgttgcgagtgttggacatattcgtgatttgccgaaaagcaaaatgggcattgacgtcgaaaatgactatgaacctcattacatctcgattcgcggcaaaggcgatgtcatcaagagccttcgttctgcagctaaaaaagcagaaaaagtttatctcgcaagtgacccggatagagaaggggaagctattgcttggcatttagctttcttgctaggactagatttaaaagaaaagaaccgggtcgtttttaatgaaatcacaaaagatgcagttaaagctgcgttcaaagaacctcgtacgattgatgtcgatttagtagatgcgcagcaagctcgtcgggtattggaccgtctggtaggttattcaattagtccaattttatggcgcaaagtcaaaaaaggattgagtgcgggccgtgttcagtcagtagcattgaaaatcatcattgatcgcgaaaaagaaatccgcgagtttatacctgaagaatactggagtatcgatggcaactttaaaaaagcaacaaaaaagttcaaggcgactttctgggggctagatggtaaaaagaaaaaactaccaaacgctgaaagcatcaaagaagtgaccgatcgtttagatggcaaagattaccaagtgaccaaggtagaaaagaaagaacgaaagcgcaatccttcggctccttttacaaccagtagtcttcaacaagaggcagcccgcaaactgaatttccgtacacgtaaaacaatgatggtagcccaacagctttatgaaggaatcccattaggcaagcaaggaacggtggggttgatcacctatatgcgtaccgattctacacggatcgcggatacagctaaaggagaagcggcggaattcatcgaaacaacctatggctcagctttttcagctcatggtggcaagaaaatcaagaatgcgcaaggggcgcaagatgcccacgaggctgtacgtcctacaagcgtcatgcgtacaccagaagaaatggaaaagtacttggacaaagatcagttgaaactctatcgcttgatttggtctcgttttgtagccagccaaatgacccctgcgattttggatacaatgaaagtgacgctacagcagaatggcgtcatattcatagctaacggatccaaaatcaaatttaaaggattcatgcaagtgtatgttgagggacgagatgacggcaaagaagacaaagagaatattttgccggaattaaacgaaggggacgttgttcagtcgatctctatcgaaccaaaacaacacttcacacaaccacctgctcgttttagcgaagcaacgttgatcaaaactttagaagaaaatggtgtagggcgtccatcgacttatgcaccaactttagaaacgatccagcggcgctattacgttaaattaactcaaaaacgttttgaaccaactgaattgggagaaatcgttaattcgttgattgaggaattcttccctcaaatcgtcgatacccatttcacagccgagatggaaagcagcttagacagtattgaagcgggcaaacaagaatggatcaaagtcgtggaccaattctatcgaccatttgaaaaagaattatccaatgcggaagaaaatattgagaaaatccagataaaagatgaacccgctggcttcgattgcgatatttgcggtcatccaatggtcatcaagctaggtcgttatggaaaattttatgcttgtagcaattttccagattgtcgaaatacaaaaccgatcgtcaaagaaatcggagtggaatgtccagtttgtcaccaaggacaagttgttgaaagaaaatccaagaagaaccgaattttctttggctgcacacgctatccagaatgtgactttacgtcatgggataaaccagtaggcagaaactgtccaaaatgtgacaactatttggttgaaaagaaagtcaaaggcggcaagcaagtcgtttgtatcaaaggtgattatgaggaagatgttcaaaagtaggctatcgatcgtttttgacctctcaataaaaaaatgaagtgagcgcaagaagtatctgctgagagacagcagacttctgcgttccttttcaaaaaacagagctgtgacacaaggaatagaataaaaaatatgcagagacaaacggtgatctgaagatcagcatctgccaatgtaagggttattttttgttttgatgacttttggcacagactcttttactataaaggagacgaagtatgaaaaaaatcaatgtaattggtgctggattagcaggaagcgaagctgcttggcaagctgctgaggcaggagtggctgtcaatttgtatgaaatgcgtcctaagaaaacgacagaagcccatcatacgaataattttgcggaacttgtttgtacaaattctcttagaggaaacaatttaaccaatgcagtaggtgttttgaaagaagaaatgcgccgcttgaattcggttattatctcttcggccgatcagacagcggttccggctggtggtgcactagccgttgatcgggacgatttttctgaattagttacaaagcgggtgaaagaacatccgttggtaacagtgatcgaagaagagatcaccgaaatcccagaaggaattacggtaatcgctactggaccattgacttcagaaccgttatccaaggcgattcaagcattcaatgggtcggaaggcttctatttctatgatgccgcagcgccaatcattgataaatcaactattgatatggataaagtttacttgaaatcgcgatacgacaaaggagaagcagcatacctgaattgtccgatgaacgaagaagaattttatgcctttcgtgaagccttggtaaatgccgaagtcgctcctttgaaagagtttgaaaaagagaaattctttgaaggctgtatgccaattgaagtgatggcctctcgtggtccaaagacgatgttgtttggaccaatgaaacctgttggtttggaagatcctaagacaggcaaacggccttatgcagtgatccaattgcgtcaagataacgctgctgcctcgttgtacaacattgtaggtttccaaacgcatctaaaatggggagaacaaaaacgggtctttcggatgatccctggattagagcaagctgaatttgtccgctatggtgtaatgcatcggaatagtttcatgaactcgccagaacttctgcaacaaacctatcaatctcgcaaacgtgatgacttgttttttgctggtcaaatgacaggagtagaagggtatgttgaaagtgcggctagcggtctagtagctggaatcaatgcagcaaaacttgcaaaaggggaagaaccaatcatctttccgcaggaaacaacaatcggcagcatggcgtattacattacgcatgcagaaggcaaacatttccaaccaatgaatgccaattttggcttgcttcctgaactgcccgaacgaatcaaagataaaaaatcccgttatgaggcattggctaatcgtgcgcttacagctttagaggctgccaaagaaacagttgcaaattaattgtcgaaaactttctcacgagaaattgttgagaaagttttttttgaattgtcttgaaacttggtagcggttatcatatgattaacagtaacaatagcgaaggtggtgacgatcgtgattggggaatgggtcacattgcttcaagagtatctgcagcagtttccatcttatattcaaatagtgggctggctgattgtactatttgttttgatatttgccgtttttctgcttttcagtttgttgctaggcccgtttatgtggcttttcaatcgcttgacagataaaaatcgtagcaatgttcttggtcatgaagattttttgattggtgaattgacagaaaagatcgtcggaaataccctcggtgaagtgatggagattggcagtaagacagcgcgttctgtttatccggcaaagttctataaagaagaggatattcgagaaaagcgagaattaccagtcggaaccaaagtgattattgttgattttgacaaaaaaggtattgctttagtggtagaaaaccacaattttattgaatagggagtgttggaaaatgttagatacagggaatgcattagattttttaagtaatccaattttatggatcatcgttttagtcgtgttattgatcgcatttttaatgattcgttaccgaatcggcaagccagatgaagcgttgatcgtaacggggtcatttttaggtaaagaaggcatcaagattttaaaaaatagcggaacattcgtgatcccaattgttcaaaaagcacataaattgagtttactgacgcataaacttgaaattggcacaccagaagtttataccgaacaaggggtaccgatcaaagcaagtgcgacggttttagttaaagttggtaacagtacggaatcgatcaaaacagctgcagaacaatacttaggcaaatcaaccggcgagttggaagatgaagcacaagaagtactggaaggccacttgcgggcgattctagggacaatgaccgttgaagcaatttacaaaaatcgagatgattttgcggaacaagtgcaagaagtcgcatctaccgacttgaaaaaaatgggattagagatcgtttcatttacaatcaaagatgttagtgacagtaacggctacttagatgccttaggacgaccgcagattgctgaagtgaagaagaatgcagaagttgcagaatcaaatgcattaagagaaacacgaatcaagcaagccgaaaatgaacagttggcacagcacgaggaaattcgtcgccaaacggaaatcgcagaagcaacgaaagatatggcattgaaacaagcacaatacaaacaagaacgggaagtagcagatgctaaagcagaacagattgctgtgggcgaaaaaatgaaagtccaattgatcgaacaagaaaagaacatcgagatccaagaaaagcaagctgaactgacggaaaaagaattgaatgctacagtccgtaaaaaagcagaagccgataaatatgttgtagaacaaaatgccttggcagataaagcaagagaaattgctcgtgcccaagcagaggctgaaaaagtgaaactagctgcccaagcagaagcagagagaatcgaaaaactcggttcggcagatgctgaaagaatcgctaaagtcggtcaagcagaagccgaaagtcgcgaaaaaatggcgattgctttaactaaactgaatgaagcaggtattttgatggaattcatcaaagtattacctgaaattgccaaagaagttaatgcgccacttagcaacatcgataaagtggtcagctttggaggcaacgacggactccacgacatgggagaagccggcttggcacggacatttgatactatcaaagaaacaactggcctcgatttagtcaatctcattaatcaaaccatgtctactaaacaaggaaacaaagagttagtagcagccatcgaaagccaaaagccagtagaaaatcaatcaaacacagacaatgacacccaaccaatcgaataacccaaacaacgcactcaaacgagtgcgtttttgctgcgaatcacaacgagtggcttgcgaagcaaggcagagttgatgatgagcagcggggagcaaagcgagggtagcaaccttgaaagaattttctacggctgactctggaaagagtggaacgcaagttctacttagttcacagtgagaagctactggaggcaaagcatatgccaagttgaatttggggcaagtccttcgcaagttttcgtgtaaatcataacaatcaaaaaaagcttcgagaaacctgcggatcttttctaaattctcccttaaagaattttcataattatgtctaaactttgaaatattggttaaattctgacaattcgtttgttttttttaaaactctatgatacagttatttcgagtcatgaaatgggggattagtttgccggagaacgaacttcaaaatgatttttttcgttatctaattgttgaacgaggctattctgataagaccaagtctgcttaccaagaagacatggaggatttctttcgttttttaaaagagtctggcaatgaagactttcttgccattgatcaccgtgacgtcagagtataccttagttttttgaatgagcgcaattacagtcgcaattcgatcagccgtaaaatggccagtttgcggtcgttctatcactttttaacgaaacacgaagtcattaaagaaaatccattcgcttatattcacttaaagaaaaagaacgcaaaattaccgcgttttttttatgaaaaagaaatggaagcactttttgaaagtgtaaaagggcacgaacctttgcagcaacgaaatcgagctttgttggagatcctgtatggatccggactgcgggtcagcgaatgcagcaacctaaccttgtcagacgttgattgggagaatggtgtattgttgatccatgggaaaggaaacaaggatcgttatgttccttttggcagctatgcgcaagaagcgttgcgagactatgtctcagctggacgccaacagttgatggagaaacaccacaaacggcatgagattgttttcgtcaatcatttaggtgacggaatcacagcgacggggattgagtatgtgttgaatcaaatcattcgcaaaagtagtttggacagcaagatccacccccacatgttgaggcacacatttgccactcacttattaaatcacggggctgatatgcggaccgttcaagaattgttaggccatgccaacttatctacgacgcagatctatgcccatgtcacaaaagatagcttgcaaaaaaattaccgccaatttcatccaagagcttaaaaattggcgacaggaggaaagaattatgaaatcaccttttcattcaacaacgatttgtgctgttgaaaaagatggcaaattcgcaatggccggagatggtcaagtaacaatgggagaacaagtcgtcatgaaggggacggcacgcaaagtacgccgaatctataacggtgaagtcgtagttggatttgctggaagtgtggcagatgctttcacactggaagaaaaatttgaaggaaaactcaatgaatacaacggcaacttacaacgtgctgctgttgagttagcgcaagaatggcggacacagcaatcgatgcagaaactagaagcaatgctgatcgtgatgaatcaggaagaaatgctcttggtttctgggacaggagaagtcatttcaccagatgaagggattttggctatcggttctggcggcaattatgcactcgctgcagccagagcgatgaaacgttacggcggtgatctttctgcaaaagaaattgctgaaggagcattgaatatcgccgctgatatttgtgtctttaccaatcacaacattattgttgaagagttttaaagagggatgaagctatgacaaatcaaaatatatcaccaaaagaaatcgtcaaagaattagatcaatacattgttggccaaactagtgccaagaaatctgttgcagtagctttacgtaatcgctaccgtcgtctccagttggatgagaaaatgcagcaagatgtgacgccgaagaatattttaatgatcggaccgactggtgtcggaaaaacagaaattgctcgtcgattagcgaagatcgttgatgcgcctttcgttaaattagaagcaactaagttcaccgaagtcggttatgtcggacgtgacgtggaatcaatgattcgggatcttgtggaaaatgccatccagatcgtaaaaaaagagcaatacaaaaacgttcggctgcaggcagaaaagaaagccaatcgtcgactggttaaagtactggtacctggaatcaaaaaagagcaaaagaaatctgcgaatccatatgaacaaatgatgaatatgttcaatcctggccagcaggcagaagaaccaaaagaagaactgacggacgaaatccgcagcaaccgtcaagccatttatgagcaattagaaaaaggcttattggacaatcgtgaagtaacgatccaggtggatgaaccaaaaacacaggcaccaatgatgaacaatggattggaacaaatggggatcgatttgaatgaaacattaggtgcattgaaaccgcaaaagaaaatcgaacggacagtaacggtaaaagaagctcgagaattattgatccaagaggaatcttcaaaattagtgaatgatgcggatatccatagtgcggcattgcgtttagccgaatctagcgggatcatcttccttgatgaaatcgataagatcacatcaaaatcgcaacaatcaggcgaagtttctcgtgaaggtgtgcaacgggatattttaccgatcgtagaaggatcacaagtcaacacgaaatacggccctttacaaaccgaccatatcctattcattgcttcaggtgcctttcatttgtcaaaaccaagtgatttgatccctgaattacaaggacgcttcccgattcgtgtagaacttgatgatttaacgaaagaagactttgtcaagatcctgacggagccaaacaatgctttgatcaagcagtatattgccttgttgggaacagagaatgtgacagtcacttttacgctggaagcaatccaaaaaattgcggaaattgcctttcaagtgaatcgcgatacagataacattggcgcccgtcgcttacacacaattctagaaaagttacttgaagacttattgtttgaagcatccgacatgcaaatgggagaaatcactattacagaagcgtacgttgaagacaaacttgcttctattgccaaagatgaagacctaagccggtatattttataaagggagagaaccaatgaaaacacttttagaaaagacacgacaaatcaatgaattactgcaacaaaaaaataccttcaatctggcatctgatttgccttatgataaaatggcggttattttaggtgacatactcgatagcaatgcttatattatcagtagtgacggtagtgtgttgggattcgttgagacgcatgatgtcaacaatgaacgtatcaaaaagatgtttgtagaaaaacagtttcctaaaaattatacaagtttagtagataatttatcttcgacagaagcaaatgttcccatcagcaacgatatgactgcttttcctattgagatgcgggagttatatccgaatggtttaacaacaatcgtgcccatttatggtgcaggcgaacggttgggcacgatcattttgtctcggatcgaaaaaacgttcgatgacgatgatctagtcttagcagaatacagtgcaactgtagttggcatgcagtttctttatcaaaaatcccgcaatatcgaagaagacgttcgtagtgcgactgccgtacaaatggcgatcaatacactgtcatacagcgaattgaaagctgtccaagcgatttttgaagcattagaaggggatgaaggacgtttgaccgcttctagtattgcggatcgaatcggtattacacgttctgttattgtaaatgcattgcgcaaactggaatcagcaggtattattgagtcacgttccttgggaatgaaaggaacttatttaaaagtgttgaatagtcgtttcaaagaggaattgaacaaacatcaatattaggagatggcgatatgacagttacgatcagcgcagggcatttgcaggcaacaattgccgaaaaaggagccgaactgcaaagtttgattgatgtgaataccaacttagaatatatttggcaagctgatcctgcacattggggaaagcatgcaccaatcttatttccgatagtgggtgcgttgaaggacaatcaataccgctacaaaggtgaaacgtatcatctgccacggcatggttttgctcgagacatgatgtttgaagtcgtggagcacaaagtagattatgttcgtttactactagctagcagtgaggagacaaagagcaactatccctttgattttcagttgtttgttagttacgaattaggtggagacggtcttgtagtcaagtatcaagtcgtaaatgatagtcaggaagacatgttcttctctatcggtggtcatcctgcattcaatgtaccgttaggagaggataatgtatttgaagatttttatctcacattctcacctaagaaatctcgtgtaaaattgccgttggtaggcaattatatcgatctggagcagcggacattgggacaaacgaacactgatctacggttgactcatgagatgtttaagaacgatgccttgatttatgaaacgaaagggttgaattcattttcgatccgcagtgaaaaatctcctcacagtgtgacattgagctataataatatgccttacgttggcttttggacgacttatccagtagaatctccttttttatgtattgagccatgggtaggtattgcagataccttagagactagtggcgaactacatgaaaaaacaggaatccaatgcttggcagccaacgagcaatttgaaacgaaatattcgatcacagttaagtaagcctatgtgaataagaaaaaaagaagctgggacgaaagtcatgaatgacttttcccagcttctcctattcttttttattaagaccaaaagagatacggctctctgtgccgtctttgatccgcttgatattttcacgatgacggataaaaataaaacaggtgacaccaattgcgatacacgtcaataaccaattttgttttggtaaaatcattggtgcgacataaggcaataggattgtcgacaaagtgatcaagcaggctgcaatcatacttgtcaggctgaccatgctggttatgaacaaacaaaccacaaaaataagcgctgaataaatgaagaaaattggattgtagcctaaaagcatgcctgcgctggtcgccaccgctttcccgcctttgaacttggcaaaaattggaaacgtgtgacctagaatagcacaaacaccaaaccaaagaggattgattgttgtgactgaaaagatcgccggcaaacaagtagccaaggtacctttcagaatatccatcaataaaacaatgacgccagctgatttgccaagaacacgaaaggtattcgtagttcctgtattcccgctgccaaattggcgaatgtcttttttgaagaatagctgaccgatccagacaccagagggaatcgaaccgagcaaataagcaataaatagtaacagaatcgtcttcatgataacccactttccttgaaagtctagagcaattttagcatgaaaccgtcgcagcaacaataagaaaatactgaagctatggataaacgagcaatgatagatggatcatccaaaagctaaaagtgactttgccttgtcgaacggtaggaaaaaggataagatagtttagaaaaatgttcgcttgaaaaaagccgattttatgttaagattttttttgcgaatcattcatgttgggtttccgcggaaacccacttaatttagttaaaggagcggtggctttggcaaagaaaaccacagagtataatgatgcctcgatacaagtcctagaaggcttggaggcagtgagaaagcgacctggtatgtatatcggatcgactgacggccgaggcttgcaccatttggtctacgaaatcgttgataatgcggtcgacgaagcactatcaggattcgggaatgaaattgatgtcactatccacaaagacaatagtatcagtgtgcgagacaatggtcgtggaatgccggtaggaatgcatgcttcaggaatcccaacagtcgaagtcatctttactgtactgcatgctggcggcaaatttggccaagggggctataagacatcaggtggactccacggagtgggtgccagtgttgtaaatgcgctatcaagctggctagaagtttctatcgtacgagatggtatcgaataccaagagaaattcaaagatggtggcaaacctgacggtacattgaaaaaaatcggaaagacgcggaaagcaactggaacaaccgtacgtttcaagccggatgacacgatttttacaacaacgaaattttcttatgacacgttagcagaacgattgcgagaatcagctttcttattaagaggagtgaaaatcaccctaacagatgagcgggctgaattgcagcaagaggtctttttatttgaagaaggaatcaaagagtttgttgattatttaaacgaagaaaaagatacattgacgcctgttgtgtatttttctggcacaaaagaagcaatcgaagtggaagttgctttccaatataatgatgggtattccgaaaatgtcctatcatttgtaaataacgtgcgcacgaaagacggcggtacccatgaagtgggaatgaagatctctatgactaaagctttcaatgaatatgctcgaaaggtcggcctgctgaaagaaaaggataaaaatctggaaggcagtgattttcgggaaggtttagcggcagttctgtcgattcgggtaccagagaatctgcttcaatttgaaggtcaaacaaaagaaaaactaggaacgccgatcgcacgaaatgcggtagacaatgtgattggtgaacaactgggttattacttgcaagaaaatagcgagatgagccaaatgcttgtccgtaaagccatcaaggctcgggaagcgcgggaagctgctcggaaagcacgagaagaaagccgcagtgggaaaaaacgcaaaaagggcgaatcgttgttatctggaaaattgacaccagcccagtctcgtaatccgaaaaaaaatgagttgtacttagtcgaaggagactcggctggtggatcagccaaacaaggccgagaccgtaagtttcaagcaattcttccgttacgtggaaaagtcatcaataccgagaaagccaaaatgcaagacattttgaaaaatgaagaaatcaatactatgatctacacgatcggcgcaggtgttggtccagaattttcgattgaagactgcaattatgacaaagtaatcatcatgaccgatgcggatacagatggtgcccatatccaagtcttgttgctgaccttcttttatcgctatatgaaaccattgatcgaagctggcaaagtttatattgcattgccgcctttgtacaaagtttcaaaaggcctaggcaaaaaagccgtagttgaatatgcctggacagatgacgaattaaacgcggtgaccaaaaaaattggtaaaggctatatgctgcaacggtacaaagggttaggtgagatgaatgcagatcaactttgggagacaacgatggacccagaaacaagaacattgatccgtgttcgaatcgatgatgcggcacaagcggaacgacgggttactacattgatgggtgataaagtagaaccgcggcggaagtggatcgaaagccatgtccaattcagcttggaagaagacggcagtattttagagaaaaaagaagagacgatccctggattggtcgaagaaaaattacaagaagctgagcaaatttcagcaatcagcttgtctgaggattaggaggggatctcttggaacataaaaacaatatacaagaattaacattagaagaagtgatgggggaccgtttcggcagatactctaaatatattatccaagaacgggcattaccggatattcgagatggcctaaagcccgttcagcgacgaattttgtttgccatgaatcaagatggaaatacttatgacaaaggatttcgtaagtccgcaaaatctgtagggaatatcatggggaattttcatccccatggagattccagtatttatgaagccatggtccgtatgagtcaagactggaaattaagacaaatcctgatcgaaatgcacgggaataacgggagtatggatggtgatccgccagcagctatgcgttatacagaagcccgtttgtctgaattaagcggagaattattgaaggatattgaaaaagataccgttgagttagtttggaattttgacgataccgaaaaggaaccaactgttttgccagcaaaatatcccaatctgctggtcaacgggtcgacagggatctctgccggttatgcaactgaaattcccacacacaatttaagtgaagtcattgacggaacgatttatttgattgatcacccgaacgcctcattggataaattgatggaattcattccaggtccagatttcccaactggcggcatcttacaaggaaaagaagaaatcaagaaggcatatgaaacaggtcgtgggaaagtgatcttacgttcaaagactagaatcgaagatatcaaaggcggcaaacagcaaattgtcatcaatgagattccttacgaagtcaataaagcgaatctggtcaaaaaaatggatgagattcgtttaaacaaaaaaatcgatgggattgccgaggtccgggacgaaacggaccgtaccggtttgcaaattgtggttgagctgaaaaaagatgccaatgctcaaggaattttgaactatctatttaaaaatacggaactgcaaatcaactacaatttcaacatggtagccatcgatgaaatgcggccgcagcaagtcgggttgaaacatatcttagaaagttatgtgaaacaccgtcgggaagtcattgctaagcggagccgctatgagctgaagaaagcgcagaaacgtcagcacatcgttgatgggttgatgaaggctctttcgatcctcgatgaagtgatcgcgacaatccgcagcagtaaagacaaaaaagatgcaaaaaataatctggtcgttcagcatgggtttacagaagaacaggcagaagccattgtaacattgcaattgtatcgcttgactaatacagatatcacgcaattacaggcagaagcccaagaattagctgaaacgattcgcgaattgacgaaaattttgaatgaagaaacggaattattaaaagtcatcaaaaaagagctaagagaaatcaagaagaaataccactctgatcggatgaccgagattgaagcagagatccaagaaatcaaaatcgagacccaagtacttgtcgcccaagaagatgttgtggtaactgttacgacagatggctatgtcaaacgcagcagcttgcggtcttatggcgcttctaagccagaagagttaggcatgaaagaaggcgatgcactgctttatagcgggcaagcaagcacattggatcatttgttgctggtgaccaataaagggaacgtcatttatcgccccattcatgagttgccggatctcaaatggaaagatctaggggaacatatttcgcaaacggtaatgaatctagcgaccgaagaaaccattttagctgtattcacctatcaagaacttgatccgcaaaagaatttcgtgctgattagcaaaaacggtatgattaaacaaacaagaatgacagaatttgaaccttggcgtacgtacaagagtcggccattgactatgatgaaactaaaagatgaggccgatgaacttgtcaacgtgtatttagcggatcaaaatgagccgttggatgtctttctagttagttatcgtgcttttggcctacgctatccattagccgaagtgcctgttgtaggaccaaaagctgctggagtcaaagcgatgaatcttaaagaagatgatcagatcgtcaatggattattggtttactcggaaggagatacgcctgtaatcatggtcactcagcgaggggcggtcaaacgaatgctggctcaagaaatcagtcagttaggacgagcgaaacgaggactgatggttctcagagagttaaagaaaaatcctcatcggattgtttatatgggaagcggtgaaaaccaatccctgattttgactactcaaaaggggcaaatgatcgagatcgagacgaatcaaatcccaatcaatgaccggacatcgaatgggtcctttgttaccgatgaaaaatccggcggcttgatccatgaagttgctcgagtgattgatcctgcgattcaagaagattctgtactataagttaaatgtaaaacacgcatctgtaccaatacagacgcgtgtttttttctatataattaatttttcacattttcaaaaaatggactttaataaaaaattcacatttaaaaaacgttgatttaaaagctgtttcgttgcgttttatgttttaatagctaattttgttaaaaataattcttgtaaatgcttgcaatgcaaacgctttgtgttatactattcacgtaaagctgttacacttagtgaacagaaaatttaaggaggtccatcaaatggaacaatggaatggatttaaaggaaaaacttggaaagaagaagttaacgtacgcgacttcatccaagaaaactacacaccttatgacggaacagacgaatttttagctggcccaactgaagcaactacaaagctttgggatcaagttatggacttgaacaagcaagaacgtgacgctggcggcgttttagacatggatactaaaatcgtttcaacgattacttctcacggcccgggctatttgaacaaagagttagaaacagttgtcgggttccaaacagacaaacctttcaaacgcagcttgcaaccgttcggcggtatccgaatgtcagaacaatcagcagaatcttatgggtatgaaattgattctgaagtttctcacatcttccgtgactaccgtaaaacacacaaccaaggtgtatttgatgcgtacactcctgaaatcagagctgcacgccgttctggtgttatcactggacttcctgatgcttatggtcgtggtcgtatcatcggtgactaccgtcgcgtagcattgtatggtgtggattacttgatcaaagaaaaacaacaagacttgttgtattgcggcaatggcacgatgtcagacgatatcattcgccaacgtgaagaattaagtgaacaaattcgcgcattaagcgaattgaaagaacttggtacaatctacgggtttgatatttctcaacctgcacaaactgcaagagaagcattccaatggttatatttaggctatctagcagccatcaaagaacaaaacggagcagcaatgtctctaggacgtacgtcaactttcttggatatctatgtagaacgcgaccttaaaaatggcgtgatcacagaagaagaagcacaagaaatcgttgaccatttcgtaatgaaacttcgtctagtgaaatttgctcgtacacctgaatacaatgcattattctctggtgacccaacatgggttacagaatcaatcgccgggatgggtgaagacggacgccacatggtaactaaaaacagcttccgtttcttgcacacactagcaaacttgggaccagctccagaaccaaacttgactgttttgtggtcaacacgcttgccacacaacttcaaaacattctgtgcgaaaatgtctatccaaacatcagcaatccaatatgaaaacgatgatgtaatgcgtggacattggggcgatgactatggaatcgcatgttgtgtatctgctatgcgcattggtaaacaaatgcaattcttcggtgctcgtgcgaacttggcgaaaacgttgttgtatgcaatcaatggcggggtcgacgaaaaatcaaaagcgcaagtgggacctaaattccaaccaatcacttcagaatatcttgattacaatgaagtaatggaaaaatatgacacaatgatggactggatttgtgatttgtatgtcaatacattgaacattatccactacatgcatgataaatattcttatgaacgaattgaaatggccttacaagatacagatatcttgcgtacgatggctactggtatcgcaggattctctgtagcagttgactcattatctgctatcaaatatgcgaaagtccgcacaattcgtgacgaaaacggcatcgttgaagattacgaaatcgaaggcgactatcctaaatatggaaacaacgatgatcgcgtagacgatattgctgttaacctattgaaaactttcatgaagaaagtaaaacgcacaaaaacttaccgtaactcaaaacatacaacatcgatcttaacgatcacttcaaacgtcgtttatggtaagaaaacagggaacactcctgacggacgccgcgctggtgcgccatttgccccaggtgcgaacccaatgcacggccgcgatacacacggtgcgttggctagtctttcatctgttgcgaaattgccatatgactattcattagatggtatttcaaatacattctcaatcgtacctaaagcattaggacgtgacgacgaaacacagcaagaaaacctagcaactatgttggatggttatgcagcaaaaggtggtcaccacttgaatatcaacgtattcaaccgcgacacattgcttgatgcacaagcgcatccagaaaaatacccacaattaacaattcgtgtatcaggttatgcagttaacttcatcaagttgacaaaagaacaacaagatgacgttatcgctcgtaccatgcacgaagcaatgtaatagcacaaaaaaaggcggcggatggaacattccgccgctattgttatgaatcactgcgactgtgaagcagagcagatgatgacaagcgtagtttgttcatcaaactattgcctcactgcgagtatgggcgaggaatcaatggaataaaacgatgcaactttatttttagtttcttcaagaaaggaagagcaacatgtcagtaacaggacatattcattcaacagaaagtttcggatcagtggacggaccaggtattcgctttattgtctttatgcaaggatgccggatgcgttgtgagttttgtcataatccagatacttggaaaatcggtgccggtatcgaacggacgacagatgacgtactggaagaagcactcaaatatcgagaattttggggagaaaaaggtgggctgactgttagtggcggagaaccattgcttcagttggacttcttgatcgatcttttccgaaaagccaaagctgcaggggtgaacaccaccttagatacgtgcggaaaaccttttactcgggaagaacctttttttagcaaatttcaagagttgatgactgtcactgatttactattatttgatatcaagcatattgataatgatgctcataagaagctgaccacacaatccaacgacaacatcttagaaatggcaaaatacctttcagaaatcaataagccagtctggatccgtcacgtgctggtgccattcagaagtgattatgatgagtttttgatccgtttagatgcgtttatcaagacgttgaataatgtagataaagtagagattttaccttatcacacaatgggtaaatataaatgggatgaattagggctgaagtatccactggaaggaattgagccgccaacacaagatcgcgtgaaaaatgcaaaagagttgcttcatgtcgatgactataaaggttatcttacccgttaacaagcgtagagaagataactattgattctttcctattttttgctatcattagaaagtggaaaatgaatgaattaggagcgatcattatgtcgaaaatattagtatttggacaccaaaatcctgatacagatgctattggagcagcaattgcttttgcgcacttgcaaaaggaattaggaaaagataccgaagcagttgctcttggaacaccaaacgaagaaacgcaatttgctttgtctcattttgaacttgaagccccgcgtgtgattgagcagattgaggctggttcagaagtgatgcttgtggatcataatgagtttcagcaaagtgcagaagggatagcagaagctgccattttagctgtagttgaccatcatcgtatcgccaattttgaaactgcaaaccctctctactaccgtgcagaaccggttggctgtacgagtacgatcgtgttgaaattataccgtgaggcaaatgtagagattccagcagctattgccggaatcatgttgtcagcgatcgtttcagatacattgttgttcaagtcacctacatgtactgaggaagatatcgccgctgcaaaagagttagcagcaattgctaatgtggatctagaggcgtatggcctggatatgctgaaagctggaacaaatttaacaactaaaacagctgctgaattgttggatctagatgcaaaaagttttccgatgggtggaaaaagcattcgtatcggtcaagtaaatacagtggatttgaatgaagtgtttagccgccaagaagagctagaaacagcaatgaaggccgaaaatcaggcaaaaggttatgacttgtacctactagtcgttactgatattttgaacagcaattctgaattgctagtgattggagagccaactgcaccagttgaagcggcgtttaacgttgttttgacagcaaatcgcgcattcttaccgggggttgtttctcgtaaaaaacaagttgtgccgcaattaactgaaagctttaataactaatagctgacaggataatacgggcaaaaaagatgaacatttgaattggtcggacaatcagcaactgcagtcctttcactgtaataatgaaaggtttttggctagcaggggagcttaagattgtccggctatttttgaatgagagacggccctcctagtgggaatggaaagagagcgaaagacatggaatttttttatagtagtcattatcaagggattcagaaaattattgattcagagttgttctcaaaactgattcttttcttgaaaaaacaacaaaaaccaccaatcttaagagaattaaaacaaaattttccagagaaaaattttgaaaaaatacttgatcagttgatcgatgctgggatcattacccgaaaggatcgtcgctatcaagtggcatttcctatctattccacaaaagatcagcagaagagtcgtgagcgttggcaacaacctaatacgataattttagaagagttggcgttcattttacaagcggacatcatgagtgatcagcgctttttctatgcttgtgaagaaggtgtggtacaagcattcatttatcggctaatccatgagtcttttcagcttatttctttttccaaagaaaaatggccagcaacgattcccgctttttttgcagcaaatcgacaacaactgtcattgccaatttatcaggagctgttgcatttgctaggggatgttgatgaggcctattacttagatcaaatcagtgtcatctttgaacgggtggcaaaacagcgaaaaatccggccaagtatttttctcacatcactcatagaaggaaatattcttcagtcagaacagcgttttgatcttcctattgttgaggctgcatttctcactgagcagaatgggtcattgatgaaaggattgtccgaatttgatcggcgtacattattagcagattatcttggaaaaacatctaatccacaaacaattctcattacggaaatgataaaattttaataaatgtttagaaatagaaaagataaaaaagaaagaattcgttaaaaccctctttgggataacgttttctttctttttttgcattttttattatttgaaaatgattagaaaataacgagcgtattaattgattgttctcatttgaggtggtatgataactttagaattttgaaagagggcgtaaaaattggaaggaatcaaagcatttcatacagaagtgattgaagaaacaagaagcaaagcagagatgatcacttttgtttcgatggcggaaattgagcatgcacgaaaagaactttgcgaagccggtattcaagaaagccgcttttctgatggagaattaatttttgcacttaaacaaaaaaatgaatgtcatgcaaatacaatcgtaccaatcgtgatcgactggttattaatgaaaaactatttattgactccggcccaagctgttcgttttttgacgaataaattaggacagacagaatcagtatctttgaaagcattaggagatcttgagtttgacggggatggaaaatactttttgattgcctgtcgatcaatgaataagcaatataaaaaagtgtataaagtatatacagatggacaagtgaaagaactttggcgggcatgatcctttttaggatcgagagaaaggtcatgcctgtctctgaatggattaatcaaaggttgtgagtctcaggtgaaatcaaatcaaagaatcgtctttgcaagtagccatgtgtttatttttattcttagtatggtgtcggcacttttatttattttaaaagttcctaacacatttaatgcaaatcaaattttttcagagaatatacatttttcagacacagtctttgatgtggtcacaaggctttttttattgggcatctgtagtttatatacaacagttgccagcttctggtcttttcgttcttggccttatctttcagccggaattgggatcgctgcggtcataacggctttccagatgaaagttcaattccatccatttttgtttgctttatttttgatcgtcggtttgtttcaagtaagtgtcgcttcttatgtcgcttttgtttccaaaaaaagaagcagcactgaaacaggttgaaccaatcgtgttcaagctgttttttttctgccttaaatcttttgattataagcagaggatcgaaatacaacgaatcaggaataggaattgttctattccggcaatcgccaaggcttttacgttacgagatctttaatttatgctattctacatataggagcagcaatgctaaattaaagccatctgccctgaactattttcccagtgatcttcctaatattctgtttttagatggaaggttgattggctgaaaaaatagggttgatttaagaggaggtttgacatacgagtggaaaatgagcaaatgattacagcagagaagcagtttacgaccggtgaaaatttttattcacagcatcttttaggtgcacatcgtatgaaagcaggctatgtttttcgtgtctgggcgccaaatgcgcaaaatgtctggctagtaggtgacttcaatcaatgggatgactctttgccgatgacgaaacgctccgaatcggggatttgggaaattaccaccaatcagcctcaagaaggacagcattataaattcaaggtcaagcaagccgacggccgtgaaatcatgaaaattgatccatatgcaatttatttcgaagaacgtcctggaacggctgctgtcttgtacaccgtgccggcaaaaaaatggcgtgatggtttgtggcaaggccgcaaaaagcgtcaaaatcaatttaaacgaccacttaatatttatgaagtccatgcaagttcttggaaacaccacgcagatggaaccccttatcgtttttctgaattaaaagatgaactcattccttacctcaaacaaatgggctacacccatattgaatttatgccattgatggaacatccattaggcacatcgtggggttatcaattgattggctattttgcgctcagcgcttattacggcacaccagaagaatttcaagattttgttgaagcctgtcacttggaaaatatcggtgtcctagttgactgggtgccgggccatttttgtgtcaatgatgattgtttggcttactatgatggaacgccgacatttgaatatcaagatgccgatcgtgcaaaaaatgttcgttggggagcaatcaattttgatttaggcaaaccacaagtacaaagtttcttgctatccagtgcccttttttggatcgaattttatcacatcgatgggattcgcgtggatgcggtttcgaacatgatctatcgagactacgaccagggtgtttggcaaccaaatcatgaggggggcaatcgaaattatgaaggttattacttcttgcagaaactaaatgcagtcgtgaaactggcgcatccagaagtgatgatgatcgctgaggaaagtacctcagaaacgaaagttacaggcctgattgaagaaggggctcttggatttgattacaaatggaatctgggctggatgaacgatgtcctgcgtttttaccaaatggatccaatcttccgtaaggatcatttgagtttgttgtcgttctcattcatgtaccgcatgaatgaaaactatatattacccctttcccatgatgaagtcgtccatggcaaacgtagcttaatgcacaaaatgtggggagatcgttacaagcaattttcacaattaagaaatttgtatacctacatgatgacccatccagggaagaaactgctgtttatgggcagtgagtggggacaatttttggaatggaaatatgatcacgggcttgaatgggtcgatttatcagatgaactaaatcagcgtatgcagcaatttacaaagacactaaatgaactgtataaacaggagcgctcattgtgggaaatcgaagataaagaagaatcgctggtagtcattgatgctgataacttagcggaaacaacattgacctatttgcgacaaggtaaaaccaaaaaagatttcgtgatcgttgtattgaatttgacacctgttgaacgccacgatttcgccattggcgttccgtatgaagggacctaccgtgaagtattgaataccgaacgcgatagttttggcgggacttggacccagaataatcaagaccaacaaacagaagcgattccattcaaagaatatccttatcaaatcaaaacaattttgccagcacttggggcattgattataaaaccagaaaagattcaaatcaaacgcaggaaaaaatgaaaggggggaggagctggctcgaaagtccaatcgaagtgacaacgtgaaaggtgatatcgaaaagaaggctttttgaaagaaaagcattcatatcgaaaataacaccggcatcgtgaaagagattggctttttagcggctcaagaaaatgaaaacagagatgttagcgatgatcctcgcaggaggacaaggcacacgtttagggaagttgaccaaaaatattgcgaaacctgcagtaccttttggtggtcggtatcgtattatcgattttacattaagtaattgtgtcaattcagggattaagaatgttggtgtggtgacacagtatcaacctttggcattgaacagtcacattggaaacggatcaagttgggggttagatggtatcaataccggagtgacgattttacaaccctactcaaattctgaaggtggaaaatggtttgaaggaacagctcatgcgatctatcaaaacattgcctacattgatgaaatggaccctcaatatgtattagtattatccggtgaccatatctacaagatggattacgaagaaatgctggaaaaacacaaagaaaacgatgcgtctcttactgttgcagtgctagaagtgccaatgaaagacgcttcccgctttggtatcatgaacacagataaaaatgaccggatcattgaatttgatgaaaaaccagcagagccaaaaagtaacttagcttcaatgggaatctatatctttgactgggctcgcttacgcagcgtactgttaagcaattatacaaaagacggcgaaatggtcgactttgggaaacacgtgattccatcttacttggaaagtggcgacaatgtatttgcttatcgtttttcaggctattggaaagacgtgggtaccattgattctctttgggaagctaatatggaatttatcgatccacagatggaactgggaatccgtgataaaaattggcaagtcttctcaaaaaatccgattgctcctcctcatttcattacagaaacaggttctgcaaaaaattcgttgatcatggatggttgctatgttgctggagatattgaacatagtattttatcagaaaatgttcaagtcaaagaaggaactaagatcacagatagtgtggtcatgcctggagcagtcattgggaaaaatgtaacactaaaacgcgcgatcattggagaaaatgcagtgatcggtgatgatgcagtcatagacggaacagatgaaattgctgttgttggttattctgaagtgataggagtgacgattgatgagaactaataaaatgtgtgccattttaggcaatctgcaccgctacaaagaactgatgcccttaacggaaagtcgtccgttgtcgacgctattgtttgattgtaaatatcgtttgcttgatttcaacttgtcaagtattgaaaatgcaaatatcaaacaagtgtatatgatttttaatgaaggagaaacacaatccgtatttgaccatatcggtggcgggaaagaatggaatctagatggtgttcaaaaccgtttcttcattcatttgttccaagactcattaaaacagcaagctgctggtcaagagtattactataacgtgatcgattatttggaaaaatctaaatcagagcatacggtttatatgggcagcaatattttgtgcaacatcgatttgcgggcgttgctgaaaatccaccagttacagaataaagaaatgacggtcgtttataaacgaatcagcagcgataacgtaagtgacaacgacttaatcttttcagttgacgaagaaggccatttgaatgaagctgtccaagcgaagaaatgcgagacagaaagtatggtcaatctttgcactgatatcttcatcatcaaaacagaccgcctgatccaagctttaaaagaaggacaagctgtaggtgctactccagacctaggtcgtttcttgcgggaacgaatctctatcgaaaatactagcttgtatgaatatactggttatttaagcaatatttatgatattcaatcctattaccaaaccaacatggatatgttagatgtccacaaatttacctcattgctttactcaaatcaaaagatctacaccaagctgaagaatgaagtgccaacctattacgctgaaacttcggatgtcaaaaatagtcactttgcttctggttgtatcgtagaaggatctgtcgaacggtcacttgttgcccgtagaacaacgattcatccgaatgcccatgtcaaagacacgatcatttttgggaataatgaaatcaaggaaggtgctgaagtttcctatgctattctcgataaaaatgttgtgatcgcagaaggtgtcaaagttagaggaaccagtgacgcaccgatcgtcgtcaaaaaaaatacccatgtcactgaagatctaattggaggagcaacggcatgaaggtactatttgccgcagcagaatgcgcgccatttttcaagacaggtggactaggggatgtcgtgggtgcattgcccaaagaacttgtcaaaaaaggggtagaaacagtcgtggttctgccattctttactaaaatgtcagccgactatcaagaacagctggaagattgtttttcatttgaagtcaatgtgggttggcgtaagcaatattgtgggttgaagaaactagttctcaatcgtgttacctactattttatcgataatctgtactattttggtcgtgataatttatacgattattatgatgatggcgaacgttttgccttctttcaactagcaactatcgaaatgatggagagaatcgattttattcctgacgtgattcatgtgaatgattaccatacagcaatgattccttttcttctgaaagaaaaatatcattggatcaatgcttatcagaatatctgcaccgttttgacgattcataatattggctttcaaggatggtatagcaaagatattttaccggacttgtttggcatggggacagagcgttacgatgacgggacattacgattaaatgactgtttgaatttcatgaaagcaggtattttatacgcagatcgtatcacaacagttagtccttcttatagtgaggaaatcaaaacaccggaatttggttgcggacttgaagtcattctaagaatggaatctgggaaactgcaaggaatattgaacgggatcgattatgaaaccaacgatcctgcaacagatccattgctgccctatcattttacttccgatgaaatgtccggtaaagctgcaaacaagcaagaattgcaaaagatgctggggctaccagcgcgtgatgtgcctcttatcacagtggtcagccgcttgactacacaaaaaggctttcatcttgtaatgccggaaatggaaaacttattgcaatttgatgttcaatttgcgcttttaggaacgggagaaccggaatttgaagaaggattccgttactttgctgcaaaatatccggaaaaatgtgccgcggtgatttcttttgatattggactggcgcaaaaaatgtatgccggagcggatctgttcttgatgccttctgcttttgaaccttgcgggctttcacaaatgatcgccatgcgttacggaacattgccagtcgtgcatgagattggcggactaaaagatacggtagattcatacaatccaatcactcatcaaggcaccggatttggtttccaagagttcacgtcattttatttgatgaatgcagtgaaacaaggaatcctgctttatcaagacgaccagcaaacgtggaaatctttgcaagcacaagccatgaataaagattttagctgggacattagttccaatcaatatattgatctctaccaagcgatcaaagtataatcaagtataagacagaagtattcattagtctgaaagtagagcgggtttgacagaacgacctagcgacaagggcgattggtgcttctgtcctttttcatacaaattgatagtcataaaggagtgaattgtaatggagaaagctaccttgcaagaattattagaaagccggttgaaagatattttttcgatcgagatcgcagaagcttcaccgcaagaattgtttttagctttagctaacgtggtcaagagctgctacgcgaatgattggagccagacacgaaaaaatctgctcgttgaacagcagaaacaggcgtattatttctcgatcgaatttttacctggaaaactgttgaaaagtaatctactgaatttagggtttctggatactgcggaagagctcttcgaagagttatccttttcattagatgaagttgctgaagttgaaaaagatatggcattaggaaatggtggactaggacgattagcttcttgtttcatggattctttggcttcattagggttgccaggaaatgggaacggcatccgttataattatggcctttttaaacaaaagtttgtagatgggcatcaagtagagctgcctgacgactggttacgtgccggaaatgtctgggaggttcgaaaggagagtaaagccgtggatatccaatatggcggcgaagtgtacttgattgaagacgagaatgggaggctgcgtcctgaacggcatggtgggtatgtctggcgtgcggttccttatgataccggaatggttggctatcaaaatgatatgatcaatacattacgtttgtggagcgttgaggttcctgcagcggaagaagccaactatgcaaccattgaatctcgtcgttctctagaagatctgaccgctgtcttgtatccagatgattctaatgaacgaggcaagaagactcgacttatgcaagaatatttctttgtctcagcaggcattcaaagtattgttcgctactatttaaaattgaatcatccgctaacgatgatgagtgaaaaaattgctatccatatcaatgatacccaccctgcattatgtgtatccgagttgatgcggttattgttagatgatcatgatttgccatgggaacaagcatgggcaatcacagtgaaagtcatgagctataccaaccatacgattatggctgaagcgttagaaaaatggccgattgatctattcaaagaagttattcctcggaattaccaaatcattgaagaaatcgatcgtcgttatcttgaagagtatgcagaggttcacgaagctgcccttcttaatcggacgcgtattattattaatggccaagtccatatggcgcatttagcgattattggcagccatagtgtcaatggtgtcgcaaagctccattctgatctgttgaaatccgttgtcctacatgatttttatttgatattcccagaacgtttcaataataaaaccaatgggatcgcacaacgtcgctggatgcagttagccaaccaacctttatcaaaggtgcttgatacgactatcggcaaaagttggcgccataacccgcaagacttgcaattattgaaaaattaccaagaagatccaacagttttgcaacgtctagcagatgcaaaactgaccaacaaacaagcgttagctgaatatatccagcagacaaccgggatcgaagttgatccaaccgcgatatttgatgtccaaatcaagcggctccatgcgtataaacgacagttgctaaatgtgatgcatattttgaaactatactttgacttgaaagatgaccctcaagcaccgattcatccacgggtatttatttttggagcgaaggccgcacctagttatcattatgcgaaagccattattaaagtgatcaatgaagtagctaacctgatcaatcatgatccgacaatcaatgataagctgaaagtcgtctttttggaaaactacaacgtcacattggctgagcggatcattcccgcagcggatgtcagtgagcaaatttccttagcatcaaaagaagcttccggtacgagcaacatgaagctgatgttgaatggggcagtcacgatcgcgacattggatggcgcgaacattgagattcgagatgcaatcggagatgagaacattgccatttttggattaacagaagaagaggtctatgcttattatgcccaacaaaactattctgcgtatgcgttttacgaagaagatcctgtgctgcaacgggtcgtgaatgcatttattgatggaacgatcccaaatatagaaagagaaggtcgggaagtgtttgattcactattaaaatataatgatgaatacttcttgttgaaagacttcaaatcttattgtgatgcccaatatcgcgtggatttagcttataaagaccaacagcgctggcaagcgatcagcttgatgaatattgcgaatgccggcaaattttccgcagattatacggttcaaaattatgctgatgacatttggcagatcgaaccattgtatgcacatgtcaaagagccaaattcagctagtctgacgtaataatctattgtacttgctcattgaatattcccaaaagacaccacagctttcgtgaattattcactgaaatatgatatgattagataaaatcgcaaccagaggatgagtgaattggcaaattatttagatgtgaaacgcaaacatttccgttttccagcatatgatgatcaagaaggggtaaagctgcagtccgaacacaaggaagttttcagtcagtctgatgattggattttgacagaaatcaaggatcaacctagcacgagcagcaaagaaaaggattctgctcactcattgcgtcggaaagttccttccagtcaccccaattacggtcatagtgtgcggcaaaaagaagaattagcgcaacatcgggcaaatttaccaagctatggaaaacgacctttgcaggaaagtacacctaccggcaaaacaaatctttttggcaatgatcaacgacgtgcttcttataaagtgacgagtaaagcagaacgggctgaaacgccaacaccgaccaagaaagagtattctgggcgatcttattttgttcccaaatacattcctgcatcgatcatccctgaacaagaaaaagaagagatcacttcacaagaactgatggattcaatggagaaaccccgcgaatcctatttgctctttgatactgagccagcagcctaccaagtaaaagaaggcgatgatcccacggtcagaaagttcaatcgaccgcaatctgtaggcatgacacggcgggaatttcgcggcatgaacaaaaaaaacggcgataagcgagctgttctagatcgttccttagaaggaatgatcgaagaggggcagtcagaaagcaataaaaatggctactttcgctcttgatgagtaggacaactgaaataagcaaaggcactcgtgagaatctctcgctcaacaagcagttgggagttattcgttaataaaacaaggataatgatttaaacaacaaagaaagcaactatctgaattgtagatgaagctgtggcgctagcttgctggatgaagtaagctgacaaaaccagtcgctatcatctgtgatttggatagttgttttgtgcttcagaataccgctagtcttttcaaaaaatatcaagaaagctgaagcgacaatttccgttaaagaagcggcagctgtcctccttgtttttatttgttgaaagaaaacggtgactaacagatggcaacttctcaattattttcacttttgagaagcatttgctattcttaaaagaggagggatacgggatggaaattgatttgcaaatgttagcgatgatcttctttatcaatatggcttatgtcacattgaatacaattcgttttttattgacgatgaaagggtatcggctgattgcaccgctggtcagtatggtcgagatcacgatttatatattaggattgtcgatggtattggatcgcttagacaatccattgaacctactgttttatgcattaggttacgccgcaggagttagtgttggaatcaaaatcgaagatcagctagctttaggctatacgatggtcacggtgattttaccgacgaatacagatgaagaaaagaatttgccaaaaattttacgccaagaaggatatggtgttactcaaagttacggagaaggattagaaggtccgcgattgatccttgaaattctctcacaacgcaaaagcgagaagaaactgtttcaaaaaatcaaacaaatcgaagaacgggcctttatcattagctatgagcccaaatatatttctggcggcttttggacgaagaaaatcagtcggagagaagctcgggtcaaaaaagaacaaaaaaaggaatagctctttttctctcctgtgcgacggtccttttttgagatataataggcaagaatttggtttggaaggaagcgaatttgaatggaaaaacaagcaaacggcatgatggcggtgatagcagcactcatctcgaatattttagttgccatcagcaagtttgtcggctacgcattgagcggcagtgcggcgatgttgaatgaaagtattcacagcgtggtcgattgcagcaatcaaatctttctgttgatcggtgataaacgagcaacgaaagggcaaagtgaacttcaccaatttggcgaaggacgcgcgaaatacttctttagtacgatcgtagcgatgatgctgttttttggtgggggcgctctaggtgtaatggaagcttttgaaaagctgctgcatcctgctcatgaagttggtaatacttggctagtgattggtattttgcttttcggtttagttgtagaaggtagttctttgtggatcgcgatcaaagaaattcggaccttgaacgtagaaaagcagcctatttatcggtttttgaaagaaagtcgccatagtgagatcttgattatctttaccgaagacttttgtgcagtgattggcttgatgttggcaatgggtggaacgatcttgacaatggtcactggcaatgcgttttttgatgctttcagtggcttgctgatcggtattttgttgatgattgctgctatctttttggcacgagaattttacagtttattgattggcgaaagcgtgacgaaaagagatcttgtactgatcaaagaagcctttgatcgtccagatgtcgatcgattattggatatcaaaaccgttcatttaggtcctgcggaaatcttagtcgctgccaaaattgatatcacagcaaaacaagaggagatcggttatcaaatcattaacgagatcgaagcaaagatccgcagcttcatgccggataaaaaaatgtatatttatattgaaacggatgagtatgatcctcattatatggagaaacggcgaaaacttgtccgatcacaagactgatttttgtagaacaaagccagtttttttgatacaatagacaaggattatctaagacgaaggagaataaaccattatgatcaatgcaagtgatttaagagcaggaatgacattcgtgcaagacggcaaactaatcaaggtattagaagccagccatcacaaacctggtaaagggaatacagtcatgcgtatgaaattgcgcgatgttcgttcaggttcaacctatgatacaacattccgtccagaagaaaaatttgaaaaagctcatattgatacgaaagctgttcaatatttgtatacaatggacgatacagcgttcttcatggacttggaaacctatgaacaatatgaaattccggttgaagttgtagaagaagaaatgaaatacattctggaaaacatggaagtgaagatccaattcttcggcagtgaagtgattggggttcaattaccatcatcagtcatcttgaaagttgttgaaacacaaccgtcgatcaaaggtgcgactgtgactggctcaggtaaaccagcaacgatggaaacaggtttggtcgtcaacgtacctgactttatcgaagaaggcgaatctctagaaatcaatacttctgaaggtacgtacatcaaacgcgcgaaataatcattttctagaagagccaaggttttatgaacttggttctttttcttttagaaagaaggatcaacatgaatgtacttgttgtggcattttttgcattttttggcggcatggcacgttattttcttgcttcggaattgccgtcttggggcatcttccctttaggcacattactggctaattttattggctgttttatttttagctttttagtcaagcagatcatgacgaaaagacacttgaatggacgtttgatcttgggcatggggaccggattttgcggtgctttgacgactttttcatcctttgcacttgacacggtgcagttgctgcaaaagcaagcctatggattagcgacggggtatttgatcctgtcgatttgcggcgggttattttttgtctggttaggcgaagccctcgttagaaagcaggtgtaagtatggcatatatcgttgtaggaattggtgcagccatgggcgctgtcctgcgttatggtatcaatcgttattttgaacgaagaccacatccttttcccaaagccactttgctgattaatttatctggtgcgttgatactagggattcttgccggtcttcagattgatcaacacttgtatcttttgcttggaacagggatcatgggcggttatactactttttcaacaatgacgattgaattatttacattgctaaagaccaatcgccagtacttttatctttattttttcagtacgtacattgtaggattgacggctagttttattgggttgatgataggtgcttatttgaactgaaaaggagtagacgatgattgcattcatgtcagcagaaatgtggcttaaaagtgagtttttttattattcaatcgttccggttttattagtcgttggattagtggcgcttttacttttgctgatccttttgttgtatcgggagaaccggcggcagggtttgatctggctgcctgtcgtagttttgttgctttgcggcggcggtttcttgttaggagatcatttttttcacgactttaaaaatgacaatgcacaaattacgccaaatatccgcgatcgggaaaaacgctttatcggatataaatattatgatcagagcacgttggcggcttatcagcgaatccaaagtgaagccattccttctctggggatctatcaagcagaaccggttagccgagaaatccaatttctgggtattgcgcacaactctgtgtatttcaaactaggagaacagtattactatttgcgccaagagccaatctttgcgaaacaagaacaagctgagctgcaaggtgtccaataccatctgattgagtccgcttttgcagacatcggtttttttacagaaacaaacaattatttaacagccatcgttttgcctgagagcaaaaaagagttagtctatgaatccattgatgggatcttgccaaaagagtttggcaaaagtcaaacagcttgggcagtccctggaaaccaataaaaaatgtcattacatgagacaaaaggataggtgaatcatccgattcatctatccttttgtgatgtctttacttcccattgaagattgagcattcaaaacatttttttctttctgttcagtcaaataacgttctttgtgtttgcgcaccagttttttaaaggcagcttccgcttttgtggcttcactacgggtagcaaaacattccgcatggatcatttgtaaggggcgacgactagctggatgagtgtactttgctccaatgccttgattgtgttgatgcaggcggcgtatcaaatctgtggtataaccaccgtaaaaggtattgtctttacagagcaatacatagaagtaatgcgtatcagctgccataaagcatccgactcacttcctcactgtagctcccatccgcatgataagtgatcagcggtgaggcaatcttgaaaccatcagctttaccatccttgatgccctcgatcaataggatattcgcgtctttccctgctttgggatagacgaaacggacacgtttgggtgcgattcgatattttctcatgcagtctaaaatatccaaaaaacgatcaggtcggtgaaccatagcaaagcgcccattcattttcagcgctttactggctgtgtagaccacctcgtctaatgtggtctcgatttcatggcgagcaatcgccagataaggattaggatttttaacagcagtgggaacatttttgaaatagggcggattacagaccaagagatccaccgagtccggtttgattttggtaaagatgttttttaaatccattgggtaaaccgttatttgttcctcaagcccattcaagcttacactgcgttgggccatatcagccagccgatcctgcagctcgatctggtaaatgtgagccgaagttttacggctgataaacaagccgactgcaccatttccagcacacagatcaacgattcgtccccgtttgggaatcgttgggaagttagctagcaaaacggcatcgagggagaaagaaaagacctcgctgctttggatgattttgatatcttccgcatatagttgatctatgcgttcgtttgattgcaacatgaaagcatactcctgttctaattcatttcctttgtattatactacgattaagaataatcggaaacgacaaaaaaggcttgtcatttgaagcgtttttttgcatacttataaaagaaactggaaaggaaagtgagtatgttttttagctttatgcgaggcgtggttcgggtcattttgtttttgatcaacgggaacgcccgatatcaaaacaaagaggctttgccgcaaaatgaaaattacatattggttgcacctcaccgtacctggtgggatccgttgtatctggcggtggctgctcgtcccaaaaagttcagctttatggcaaaagaagaactgtttaagaatccaatcttgcgctttattttgattcatgcgaatgcttttccggtaaagcgtgacaaaccagggccgagtgctgtcaaaacaccggtgaaaatcttaaaagatacagatctgagtctcattatgtttcctagcggaacaagacattcgaccgcgctgaagggtggcatggcactgatcgccaaaatggcgaaggtaaaaatcgttccttctgtttatcaaggtcccttaacgctaaaagatttatttaaacgtcgacgagtaaccgttcgttttggggaggcgatcgatatcagtgatatcaagaaaatggataaagaagggttagcagaagtggaacgccgcattcaaggtgcttttacaaagctcgaccaagaaatagatccgaattttgtttatgaagtagaagagaagaaacgttgatgcgtttcttcttttatttttgactgtgttttaaataaatattgaacttgataattttttgaggatatgctatgagataatcaataacaagggtttagttacaggtttagagggcctattatggcaaatagtaattctttgatttcagatgttcaaaaattatttgtgaaagtagaatatataaatacaattagatacttgttttatagtgcaaattaaaatgaagatttttacacatcgaggaggtaaaatgatatgaagccaaaagaaatactttgccaatgggttgacgcatttaatcatgcggatgtagaaattatttcagaattatatgatgacaatgcaataaaccatcaggttgccaatgagccagttattggaaaagaggctataaagaaaatgtttgaacaagacttctctaacgcagaaatggtttgtatcgttgaaaacattttcgaagatggacaatgggcaattttagagtggcgtgacccgttaggtttgagaggttgcggtttttttcaaatagtaaataataaaattttatttcaaagaggctactgggataagctatctttcttgaaacagcacaatttgcctattgaataaaatgaatagatatcttatataaatagtttgtaaatttcttaaaaggtgcattaaggtaaggataataatttcccttaatgattgttagaatagtaacactgcgttaaaacatagtcttatttctaatttctaaagtaggcttgcttcgtgcttcttacctaggaaaagcagctccttattggtatgctcaaaaaaattttaaaaaggagtctctgttagacagaggctccttttttagctcatcaagagttattcagtgactggttgattttccttttccaattcatttttgtcatagatttttacaaatggataataaatgaggatggaaagtacaatcaaaagaatgtttaagacgattgctcgccagtcaccgcctgttgcaagaaaggcaccaattggtcctggcaatgtccaaggggcattgacggtcactttgttgactaaaccagccgaggtggctacccaggcaattacaccattgactaatggtgcaatgataaatggcggaatcaaaattggattcaagacgataggcgtcccaaaaatcagcggctcattgatattgaaaatagcagggatcaatgcggtttttcctagttttgatccgaattcggattttgtacgaaaagcaagcaagatcgccagaccgatggttgaccctgcgccgccgatccaaatgaaccattggtagaatggctcagcagcaatgttgggaatcacatcgccagaagctaacgcagtggtgttgccttccaataattgcagccataacggccgtgccagtgaaccaacgatcgaggcaccatggatcccaaaggaccaaaagaatgtcgttaagaaagtgatcaataagacacttggcaagctatcggctgcgctaactagaggatcaacaacttttgctacgatggtatgccagtcaaagccaatgtaataggtgattacccccatacctaaaataatgatcaatgttggcgttaaagcttcaaaagatcgagcaacagcaggagggacttgttccggcatcgtgattttaaatttagatttatccgtcaaacgataaatctccacagctaaaatcgatgtaatgatcgctacgaacatcccggcactgcccaagtttgccattggtaaaacaaatccggctgtaccagcagcctccaaagcttcggggggaatatttattggcgtgaaagtcaataaaaaagctgtggtggctaagataccaccagagagaccatcgagtttataggaacgggctaagctaaagccgatcccgaatgcggcatataaactcataatgtacatcgtcatgcggtaaggaagcaagatcgtggtcgcatggctcgaaagaaattgatagattccccagtcttgtggcaggggaggaaaagccaaaatcataaaaaatgagctgacgataatcagtggcaaagtagagacgatcccatcgcggaccgcccgtaaatgccgttgactccccagtttttccattggtccagccaggtgacgttcaatgaactgtgtaaatttatctaacattttttaacctcctgtgaaaacgttcatatggttgaattaataaagttatgttgggtgattccgctctcctatgggaccaaatggatttgggatgatctttcccagaatcacggattgtttggcaccagtcgcggcaggagcattatttttatgtccctgtaaggtctcgtatcctaaaagggcaaatgccatagcttctttcgcatcattggaccaacctaaatcattttgggtaatcactgtaatctcaacgggtaagtagttgaccagcattttttttagtgttgaattatgcgcgccgccgcctgctaaaatcacttcaatgggtccgctttcaacaagtgggaaaacgaagcgccgataactctcggcaatcgagtaggcagtaaaatcggtcactgttgctattaagtctgctggtttttctgcagaaaaatctgctaatagttgatcactgaatgcttgaccaaatagttcccgtccagtgctcttagggggtgcttgatcgaaataggaatgatttcttaattgtgtttgcaatttaggaataatggttccctgttgagcaatccttccttcagcatcgtaaggaagttggaataattgatgcatcagttcatcgatgatcatatttccaggaccagtatcgaaggcgacaagatcacttaatgtgccatttttcggcaggaccgtcacatttccaatcccaccgatattttgcaataagcgggttttatcaggggaacgatacaagagataatcagtataaggtacaagcggtgctccttgtccaccagcagccatatccatcgcgcggaaatcggcaaccacagttgttccgagtccgtaggcaatgattgacggctctccaatttgaaacgtactggaaacaagcgggttttccgagggtgcatgccaaatagtttgtccgtggctagcaacaaagtcaatgctagtttcggttactgctgtttcttggcagacctgacgacaagcagcgagaaaggcatagcctagctcaacatttaactgacagatcaaggaaacagaagagtcctccgggtcacaggcttgttttattctttggcgcaactcgggggaaaaagcagtagtcgtcagatgcaacagacgaatagatggctgtgaatgattatcgatttctactaatgcggcatcaacaccgtctaaactagttccagacatgagtccaattccaagcattgtttctcctcctttcttttgtgtttgtcgaaaccaaattagatgaacttgggcggaaatgtattcggtttcaacctcgtctttattgtagtgtatgtgtaattgcatttcaatgatttttttgtaaaaggaaatttaatttcattaatttgacaaatcagtgtgagaacccgtttggaaaaagaaggactcaattgtctgggaacgagaagatcacgttgatacattcaattcataatcgtaaagtggtataatgatgggaaggatatttttaagagggtgggtatatgcgttttttacatacagcagattggcacataggtaaaaaattacacggctatgatcttctcgaagatcaaagttacattattgaccagataattgatctggcggaagaacaatcagtagatgcaattatcattgctggggatctttatgatcgcacggtgccagccgttgacgcagtgaaatgtttaaatgagaaaatagcgaaaatcaatttagaaaaaaagtttcctttactagcgatttctggtaatcacgatagtccgacacgacttgaaactggaagtccatggttcaaaaatacgcaattttacctaacgacctccattgaagaaagtattgagccgattgaattttctgacacccagtttttcttgttaccttattttgaaccgatcgaagcgcgtttgttttttgatgaaaaaatcacaacgatcgcagaaggggtgactcgggtccttcaagagatgaagcagtattttgattctacgaaaaaacaagtcctggtgactcacttttttgtagctggttcaagccagacggattcggaaaccaaaattcaagtaggcggattggatagtgttccgacaacggcgtttgaagggtttgactatgtcgccttaggacatctgcatgcaaatactgcgctaaatcatgaacgaatccgttatagcgggtctccgttgaaattttcattgtctgaaataaccaatgagaaaggtgtttatatcgtagatactcaaaaggaccagcagcatttttatccgttgcggccgaaaagagatcttcagcaatacactgcttcttttgaaacattgcttgatcctgccttttatcggcaagtggatcgagaggccttcttacacttcacgttaacggatcgagccgtaattcctaatatgatgaatcaattacggcgggtctatcctcgaattttatctgtggagcggcaaaatgggcgaaccgtcagcaagaaaaatttgacattagccgatgaggaggatccgcaacgggtgatcgcccatttttataaagaaatgactggagaaccgttaaatgagcagcagcaaaaatggctcacaggtttgacagcgggtggagagaaggagcgagagaagtcatgcagccaagaaaattaatcatgaaaaactttggtccctacattcatgaggaactggattttggcgactttcaagaaggtggtttgtttctagtcagcgggaaaaccggggctggcaagacgacgatctttgatggaatgacatttgcattatttggagaaacttccggaaatttgcggtccggtaaagaaatgcgttcgacattcgcttcccccacagaagagacgagtgtccgtttttcctttgatcatcaacatttgcactatgagatcgaacgacgtcccgaacaagtcttagccaaaaaacgcggcgatggagtcacgaatcaagcagctaaggtacggttgacgatctatgatcagcaaggaaaagagcgcaaacaaatcagcaaaaaaaatgaagtagatatcttcatcaaagatctgctgcaattggatgccaaacaattcttccaaatcattttgctgcctcaaggagaatttcgcaattttttgatcgccagcagtaatgagaaagaaaaagttttgcggaatatttttggaacggaaatgtatcagcgcttcaatgaatggctgaaagaacaggtcaaaaagcaaaccaaacaaattgaaaaacaacaaacggcagcggatcatttggtcacacgctttgagtggaccgaaccggcaactccggtttcgttggttgagacattagcgtactggcagacagatcttgagaaacaacgaagtcatcagcaaacaattgaagcaaaaaaattccaagcggagcaagagaaaaagaccgcacaggaagctttttatttggcaaaagaaatccataaagcacttgccgagcaacaggaactcagccaacaggcagcgaatctagctgcgaaagaaagtcaaattttagacgataaactgcggctgcagcagctagactgggcgagtgagcatcaagaaatcttacgccaaaaagatgagcggacagctgaagtagcacaggctattcaacaacttacattcaatcagcaatcattagaacaatggcaagagtctcaagagatatgggacaaaagccgagaagttcaggtagatcgaaaggacgaacatacagcagctaagcaacgtttacaaatactggcacagttaaaaccattagccgagcaagttcagcaacaagaaaaacaggtcgcttctttgcaggaaacggtgactcaacaggaaaaacaagcgcagcatctgaaagaacagcaaaatcttgctatgaatcaggagcaaggattaaaagaagaaatccaaaagcattcgatctaccaagtacaggaagtccaactggttcgtggagaaaatctgttgtaccaatggcagatgttgaaaaaagaggagcagcagctgactgatacccaacagcaactaacagaccagcagcgaaaattgcaagagaagcagcagcagttagtaagtaaatatgatgagttaactgaagaattggtgcaagaaaaaagtcgaaatgccaagatgcagattgctcgtttgagtctcttattggtggagggggaaccttgtccggtctgtggctcttttgaacaccccgctgctcaaaaacatacagagtatagtaatgaagaaatcattgatagcgagcagcaacttgaatctttggagaaccagctgcaacaagttggtgaagaccgttcgacgaacttgctgctgctagaacaagtcaatgaccagtttcaaacaattaaacaaaaaatgagcgcgttgaaggaaaaacaacagacaacgtatcagacactgcgagaaatcctccagccgttgatggaaaatatgctaggtcaaacagtcctgaaagaaggagctggcaaggaaccagctgacccattgctggtagaaggattgactgaaaaggaaatttccactacctatttcaaatgccaacaaatcaatcagcagttgaaagagcaatttgctctagacagacagaaattgacagaggtccaaacaaacagccaacatcttacagaagaattgacagcacttgaagcaagtctcaagactgctagtgacgctttacgtttggaagaaggaaaactgtcctcactaaaagagcaaacggagggagtatctctggagcagttgaacgaggaacaggagcaactagcagcacaatcgtctcgtttagcagctctgattgaagcggatcagttggaagagcaacgtttgaaggaacagtatacgatcctgacagagcagcaacgaaatctgcaacagtttctagccgacaagcaacaagctgctcagctagcccaagaacgcttggaagaagtcttgcctgcggcatgtaccgaacaacagatgcgcagtctgctcaatgatcttgaggaacgccaggagctacgcagtacgataaaaacctatgaacaacaacaacgttttgttcaacagcgacagcttgaactggcacaatttttgcaaaacaaagctgtgcctgacttggaagtcttgcaagaacaagtagaccagtctgaaacagcggtagaacaattacaagaacaagtaatccgaggaaaagaacaaatcaagcaaaatcagcgattacttgaagaattgcagataatctatcaacaaaacaccaagcaattagaaaaaatcagccatttacagcaactatcagaagtcatcaatggagaaaatgaaaagaagaccagtttggaacgctatgttctgcaacgatttttaacagagatcttagaagtggcgaatgttcgcctagctcgattgacaagaggacgttatcaattcgagttggcagacaaagtggggagctatcgaagctcgacagggttggagatcgatatctatgatgataatgctggcagtcttcggcgagcacataccttatcgggtggtgaaagttttattgccgcattggcattggctatctcattagctgatgtgatccaaaatcgttcgggaggcatcgagatcgaggcgttgtttattgacgaaggatttggctcattagatgaagaatcgttggaaatggcgatggaagcattagaaatgattgaaaatgaagggcggatgattgggatcattagtcatgtaagagaattaagagagcgaatcttgcagcaagtcgttgttcaaacagatggcagcggacaaagcaaaattcgtacaaaactttagagaaaggaggaatcagaagcatatgaaatggagtattccagaaaaagtcattgaaagaggtcggacctatctaaatgaaggtcgcgtcctatcggttattccagatccagagagaaaggtatggcatgcggaagtcttgggaagtgagctatatttagtcgatcttgatgcgacggctaaagagatcgattattgccaatgcccctattgggaagaacatcactattgtaaacacactatagctgttgaactttatttacgaaagcaaggcaaaacaagacaaatcacagaagaaaaaaagccaacaaaagccgcattttcggcttcggagatgttttctcagggattcaatcgattgcagtctggacagcggacgatcactcctttgcaaattgaatatcgtgtcgaaaatctgaccacgaacccttaccaccaggagatggatgttctagggatttcactaaaagtcggtcaacggggaacttcaaagacgtatgtcgtcaaaaatatctataaatttttgcaagtctatcaagaaaaaaagagctatctggcgaacaaacaaacagagtttcttttaacgagtgaagcatttgaccaaaccaacaatgatattctgatccgcttactaggcattgctcagacacagcagctgattggacaagctggcatccaagtgaaaggcaaactagacaaaaagtatttgctattgccagttgaatacgggaaagaactattagagaaaatgaacgctgcttatatgcagttaacgattggcaacgctaaacttcgtcaagtgactttttctgaaggcaagccgctgcattttcgtgttcaaaaagaacacggtcaatttccgttatctttgacgagggattttgatcacttgctgagctattacaattggggccttcaaggcgatacgatcgttgaattgacgatggaccaaaaagaagtctatttgacgatgcagcaattattcaaacgctttgaagaaccaacgatcatttatccaaaagcggaactgtccaacttgtttatgcaagttttgcctcatttacgcaagatcggcacggtagagatcacaaaagaggtcggagcagagatccaagagagtccgttagccgttgttttttcactgcgtaaaatcaaaggtcagatcgatttgcaaattgatttcaattatggcgaagtgactttttcgactgacgaaaagcatcaagtgattcctgaggcccatccagagattttaagggattaccctcaggaaaagcggatcgaacaagtagttgaaagaatgaagtatcaaaaaagtaccaaaaattggttcaaagcgctaccggaaggggaagaattgtttgcctttttcactcgtgaaattcctttactgcgccaactaggagaagtacgtatcggcaaaaaattgcgggaactttacttagatgcacagcagcaccgtccaacgatcgaaattgaagaaaatggttcctggctggatattcactttgatgtcagcgggatcgctgaatcggagatcgatgctgtcttgcggagtttgttgcaggctgatcgtttttacacgacagaaaatgggcaagttctttcactggaaacagaagcctttcaagaagcaagcgccgcgctgaaaaaattacggacagcctttgtatctcagtcaggtacgttacaagttccgttgaaccaaggattgtatttgcaagaagaactagctgaccaagcaacttttagtcaaggattcaaacaaatgacgacagatttgattcatccagaaaaattttctgcaccattgcctcatcagctccaagcgcaattaagacactatcaggaggtcggatttcgttggctgaagatgctgagtcagtatcaatttggcggcatacttgcagacgaaatgggattagggaagacagttcaaaccatcagctacttgttgtccgaaaagcaagagaagcaacagttgaatgctctgatcgttgcacctgcgagtttgacgtataattggcagcaagaaatcaaacgctttgcaccaatgatccagtcggtggtgatcagtggttctcgggaggaacgcggcagccaattacagctgccggcagatgtccgcatcacatcttatgccagcttacggcaggacatcgaccagtaccaagaattaggtttagcgtatttgatcttggatgaggcgcaaatggtcaaaaacagcggaaccaaaacagcacaagcattgcgttctttaaatgttccccatcgatttgcattgagtgggacacccatcgagaataatcttgaagagttgtggtccttatttgagatgatcatgccgggatttttcccaaataaacaacgctacaaagaattgacgacacaagagatcgcaaaaatgatcaagccattcatattgcgacgcgataaaaaatccgttcttcaagatctgccagagaagttagaaacgaattattatagtgtactgacagaagagcagaaaaaaatctaccttgcgtatttgcgccaaatgcgggaagaaatcgcacaaatggatacagcagcatttcgcaaaaatcgtatcagcatcttggctggccttactcgtttgcgtcaaatctgctgcgatccgcgattgtttgtggaagattacgaaggcacatcaggcaagctagaacaggtcaaagacctgattcaagcagcaaaagaaaacggccgccgtgtgctcttattctcacagtttacaagcatgctttcgatcattgaagaagaacttgctcaagaaggaattgaaaccttctatttacgaggaagcactcctcctcaagaccgtttgagtatggtcgatgctttcaatagtggagaaaaagatgtctttttgatctcattaaaagccggcggaactggattgaatctgacaggggcggatacggtcattctatatgacttatggtggaatcctgcagtggaagaacaagccgctggccgggcacatcgaatcggtcagaaaaaggttgtggaagtttggcgaatgatcgctgaaggaaccattgaagaacgaatggatgctttgcaacaagaaaagcgggaactattccaaaaagtcatccaagggaatgaagcccagctgaaccaaatgacggaagaagatattcgcttgattttaagcattggtgaagaatagattcagcgaatacaaaacccttgatacgaaagcaagagacagctaggatgcgaagatttgcatctatagctgtctcttagtttttagcgagccatcacaactgcatctgtaaaggataagataccttctgtcagctcttcaaaagcagttaacgtacagtcagggtgacaatttttgatttcgggagcttggcgtcggcgatgattcagccaaagggcttgccatcccgcttgtttacagccaaagacatcattgtcaaagttatctcccacgtataatgtccgtgagggatctaaatcaaatcgttcttcagcaagctgaaaaagttcaatatccggtttttggtaccctgttgcttgagaaatcagcatgtattctggatggatccagcgagtcaattccaattgatcgattttcttttgttggtgatctgttgggccattggtaatgattccaagcttgataggtaatgaaaccaaggtattgagagtttcttctacggctggatgaagttggatgttgtctagctctgtctcgtaagtcgcttgaaacaatcggctagcatcatttgataaaggagagtagcctaaatcaatcagcgattgacatagtctaaaggtacgaaattcttctaatgtccattcttttgagatgacttttccaaaatggtcatcgctatgtacgcgaaaacgaatataaagaggatggagatctgttgttgctacttcaggtatgatggttgtaaccgcatttcgaaatggtagttgttgatcgtataaagtatcatcgacatcaaagattaccgcattaagcaaaagagacacgcctttcaaatatagtgaaaattttcattttgttttcgaacatataatagcggatatcttgagagaaaaaaagggcttaaagcttgataaataaaggttttatttactaattttagaaatccttggtctcatcgctttttcaaatttgagtgaattttacccttttcaatcgatttctcattttgcttttccagaaagacttgcttataatgtagattaatgaaaaggaggaggaagtgtgttaaaaaggttttttagctattatcggccataccggtcattgtttgtcttagattttacttgtgctgtctttgcagggctgcttgaattggtttttccagttgccgtgaatcaagtgatcgacaagattatgccgcagaacaattttcggctgattttgctcgcttgtttggggctatttttattttatctggtcaatacgatcttgcaatatatcgtggtcttttatggccataaattgggtgtcaatatcgagacagatatgcgtcaagaattattccgacacttacagacacagtcttttgaatattatgacaatcaaaaaactggacgtttgatcagtcggctaacgactgacttgtttgaaatatcagaagttgctcaccacggtcccgaggacgtctttattacgatcatgacattgatcggttcattcttgctgatgctcaatatgcatgttcaacttgcacttgctacttttgcactgattccattgattacgattgcactggttttcttcaataagaaaatgacgaaagtcaatacagagatctatgacaatctaggtgaattcaatgctggggtagaagcagcagtcagcggcattcgcgtgactcagtcttttgccaatgagacgtttgaacatcaacgatttgacggtctgagcggcctttatcgtcgttcaaaaatcgtcttttataaagtgatggcaatcagttctgcctataattactttctgattcgactgatcaatttgtttgccttgatttttggggcctattacgtgatcaaaggggaattgacgaatggacagtttgttggatttatcttgttatccaatgtctttgttcggccaatcgaaaaggtcaataccatgattgaaagctatccgaaaggatttgctggcttcaaacgcctgacagaagagctggacaagagaccggcgattcaagataagccaaatgccatcgatgtacacgcactaaaaggcgatatcgtttatcaagatgtttcctttgcttatgcagatgcgacgaaggtattgaaccatattgatctaacgattcaatccggcgagactgtcgcttttgtgggacaaagcggttctggaaaaacaacgctttgcaatttactgccgcggttttatgaagtaactgagggtcagatcacgattgacggaatcaatatccaagacatgacgcttgcctcactacggggccagatcggaactgttcagcaagatgttttcttgttcccgggaacgattcgagaaaacattgcttatgggaaattggatgcgtcagaagaagaaattgctcaagccgtgaaactcgctcatttagaacaagtaatcgaccaaatgcctgaaggattggaaacagtcattggagaacgcggggtcaaactttctggtggtcaaaagcaacgggtagcgattgcccgaatgtttctaaaaaatccgccaatcttgatcttagatgaagcgacctctgcgttggatacagaaacagaacaagtgattcaagaatcattgaattcattagctgatggacggaccacattgattattgcccatcgtttggctaccatcaaacatgcgacaaggatcattgttgtcagcgataaagggatcttggaagaaggaacccacgagcaactgttagcaacagggggacattacaaagcattatatgatgcccagttcaaaaattagacgaaaaaagcgacttcgatcgcttttttcgtttatatgcaaataaacatattcagtggatatcgctgatttcttcaaagagatttgttaggatttacttatcaaacgctttctttgtttgtaacatttgtcatattcgttgccgatgaaatgatttttcactcataatgagcaactaatgacttggaatagaatacgtgataatacagattttcgtttctttgaaatcttttaataacaagttcttttctctgtttgtaagtttttaacgagttttaggtgtaaaaaaagattggtaaagaccaatgaaagagtactagtattatagaaagaaacttgtatagaggagtcagatattatcgaatattttatcaaaattaaaaaacgatagaattaaatcactagagtgatttaaataaatctatggttcatgatacaattttgacacactgttatacaaaagaaatgaaattaaaaaaaaatttgatttttctcatttaaattgatgtaaagtttgtgaaagcttttgtttgagaggtttctcttttaatataacttgagagttttattaaaaaatacaaaatttacactagattttttttaaatagttctgtataattaaaatcaagcaagacaacagaacttgcgaatggaatttaaaaaaggagagatgcacgttgttgacactatatacttccccaagttgcacatcttgtcgcaaagctcgtgcgtggttgcaagagcatgagattccttttgttgaaagaaatattttctcagaacctttaaatatttctgaattaaaagcaatcttacaaatgacagaagatggtacagaagaaattatctctacaagatccaaagtttttcaaaaattgaacatggatcttgatgacctgccgctaaaagatttattgacacttgtacaagagaacccaggattattgcgtcgtccgatcatgattgatgaaaaacgactccaagttggttttaatgaagatgaaatccgtcgtttcttgccaagagatgttcgtcaactagaactacgtcaagcacaattgatggcaggcttataaaaatcaaatagttatgagatcagtgaatgaaaagctgatctctttttttgccattttaggattttcttaagaggatatgcgttttctctttacttttcaacaggtttcgttaaaatgaacctatagtgattagcaaaagtgaggtgtagctaatatggaaatggaacatatcaatgaaaatacgatccgtgtactgatcaagagcgaagatttagctgctaggggcatcacttttcttgaccttcttggaaatcacaatgagattgaaaactttttttatagcatattagaagaagtagatattgatgaagaatttaaaggcagtgaagcggtgaccttccaagtcttacctaaaggggatggcttagaattgtttatcagcaaaaatctaccgcctgaaggaatggaaaactttgatgatatgagcgatggttcaactgaggacattacggatatgttgaagaagcatgtcgcgtcacaattacaagagacagagtcccagccggagttaggcaatcgttttatttttgaattgaacagctttgaagcaatggttcaattagcgtccgaagtgtatttggattcagtgaccacgaatctttatcagatgaatgaccgttactatctagaagtccaatttatggataacgatacgacagacatcgaagttgagaatgcactggcttatttaatggaatttgctaaccggacacaagtcacttcagaggttttggcagagtatggaaaaatcattatggagcatgacgcattggaattgacccgttactacttcaaaaatgtctaatgttcacttataatcgtaaaagcgagaaaatggctacaatcattttctcgcttttttgcgtatttctttttgaggtgagaagatgattattgcgtatgacaaccagcagcagcggatcaaagctgatcaggcgaagaaagattcagaaccattttattgtccaggatgtcatggaccggtgcacttaaggaaaggcctcctgaaacgccatcatttcgctcattatgctgcggctaactgcgaagtgtttagtgaaggagagacggaggaacatttgtcagcaaaggagctcctctacgaatggctaacagatgaaacgatcgaaatagaagcttacttgccggatttgcagcagcgaccggatcttcttgtgggcaaaacagcgattgaagtacagtgttcggctttgtcttggagccgctttgtccaacgaacagagaagtatcttgcctataactattctccttggtggcttctaggcaaacatctacaaccgcaactccaccatcgatggaccgttttgcaaaaggcctgttgccgttttgcggagcaaccggggttttatttgtggatcatagatacgcaagagcaacgcgttggtctcatatacgagatcaattggcattataagtggggtgtttcttttcgtagacgttattttcgaaaaggagaacctatcggctgctgcccatcgctaaacaattattctagaaagtcctgtcgaacataccatcaaaggtggcagccggaagcttaccgagtctggttattacacaagttgatgcaacagcaaaaacagatcctcagtcttcaagcactcctttaccctctcggaggacatatcggcaatctgccgcattggtgctatcaacccagtgattatggttttttgttggaacatcgaattttagtcctgcgctttttatttcatcaaaatgcaaatcgaaatttttctcactggctgaatcagttgcgcaaaatgaattggaactggttgtttcctatgattgatcaagggcaactattgaaacgtatttatcaagaatgttctgatttccagaaaattcaacctttttgattctcttagctcggttcccaccaaaagtatgttaagattattttagtatgtaaaggagtgaagaatatgtcagaaacaaaacaattaccagatcgtgcggatctaccggaagcattaacatgggaccttacaaagatctatgccgatgatggggcatttgaagaagcgttccaagagatcgtggctgagttgaagcaggctgatgatttcaaagggacattatcacaaggaccagcagctttcaaggaagcattagaatatgtgttagcgatctcccgtaaactggaaaaactctatgtatacagtcatctgaaaaatgatcaagatacagccaacacaacctatcaagggctttatgcaaaagccagcaaccttgttgctcaagtaagtgaggcgattgcctggtttgatcctgaattgctttcaatggatgatgcaactatttggggttatttcgaccaagagccggaattggccatttaccgccatcttattgaaaaaactgtcaataaccgtccccatgttttgccggctgaacaagaagctttactagcaggtgcaggagaaatattcggcgcttctggaaatattttttcagtattaaacaatgccgatttagaatttccgatcgttgaagacgagaatggagagaaagttcaattatctcatggtgtttatggtcaattgatggaaaataccgaccgttccgtacgggaagctgcctttaaagggttgtatggtgtctatgagcagttccgtaatacatttgcccaaacattaagtaccaatatcaaagcccataactttaaagctaaagcacgccactatgagtctgctcgacaagctgcattaagtgccaaccacatcccggaaagtgtctatgacaccttggtagctgtcgtgaatgaacatttgccgctgctgcatcgttacatggagttaagaaaacgcttattggctgttgatactttgcatatgtatgatgtctatacaccaattctaggggaagctccgattcgctatagctatgaagaagctgtcgcaaaagccaaagatgctttaaaacctctaggtgaagaatatttagccgtggtaaacgaagcgtttgaaaatcgctggatcgatgttgtcgaaaataaaggcaaacgcagtggcgcctattcatctggcgcgtacgacacattaccctatattttgatgaactggaatgatcgtttggatcaattgttcacattggtgcatgagatgggtcacagtgttcacagttattttactcgcaacaatcaaccttatgtttatggcgattattctattttcttggcggaaattgcttcaacaactaacgagaacatcttgacagaatacatgttgcaaactgaaactgatcctcgcgtaaaagcctatgtcttgaatcattttctggatggatttaaaggaacgattttccgtcagacacaatttgctgagtttgaacactttatgcacgtagaagatgccaaaggaacgccattgactagtgaatttttgagtgacagctatggtgagctgaatgctaaatactacggtccttctgtagaaaaagatcctgagatcagtctagagtggtcacgtatcccgcatttttactacaattactatgtctatcaatacgcaacaggcttttcggcagcttctgcactagctaagaaaattttaacaggagagcctgatgccttaacgaaatatttgacctatctaaaagcaggcaacagcgattatccaattgaagtgatgaaaaaagctggagttgatatgactaaagcagattatatcaaagacgcgatgaaagtctttgaacaacggttggatgaattggaagcattagtcaaggaattagaagcataagcaagactgtcttagccactgaaggatcgttgatcgatcgtcagtggcttttttaagcaacaggttgattgccttattttgacggtgacgcctagaaaaaaagtaagtataggaaggatttgcttgtcaacagaaacctcaatttaaactttaaagtgagaaaatctttttttatgagtaagcaaattgcaagaagcaaaagtatttccatgttacgatagaaatgaaagaggaaagggggcctttggaatggacaaggaagaaatttttgcccgtcgcttggataatagcaagaaaaaacgggaagttgtcacgaaagaagctgtatctgcccacaaagagaagcagaccgaattagagcagaccgaattgccggatcaagaccctacagataaaaaagatccttcaaagaaaaattctgataggactgaatagaaaaaacatccaaacggtggatccaccctttgacggtctcttattaataggagaccaccaaaacgagggtgactcgatcagcgtttggatgttttattgattgtttaaagcaagacaagtcgtcgattcaacgagtcgatacgaggaacatcagcatccctgatatctttcttttgatagaataaacgatagttttcctgatctgttcggcaaaggtgtggaatatttctaagagcttccattccttctaataagacaccataatctcgttcacaaccgaaattatacactacagccgaaggagacatcgtaatgcccatttcgcgagcaacactttggtcggatgcgaaattctgcttgatcaaatcagacttgcgatcttctaaaaacatgtcaagatcgccgtttgtttcagcgaaaatctgtttgactaattcgaaggaataaggttctttatttacgcctacttgacattgaagtttaagtaaaaagtcgcgggcgatttttcgaccttgaagctgagctgctttgtagtccaatgaagcctgatagatttgactggtttgttgattacgcaatcctagatcggatcgatccattgaaaggtaatccattgaaatccccacagtgtgtaaattcatgattggtaatatatgcaattgtattttttttctttgatcactcagtgcgtccaacaaggtcaactcggattgataacaaattggacctatcggattcacaaacaaataaatctcgatcatctgaatctctccccaattaagattctttttcttttgtatatattaaatataacagaaattattataaatgagaaatgcctaatgagaactattcatactctttttttgacaacttctcttctaaggcacgaataattttattttttgctggacgataactgatatgcaggcgatcaagcaaagacaaaaatgctcgttttcctgaagaagcctctgagacttccagttcgagctcatagtcatgggattggccataccagctttcatctaaagcaagtaaaccttctgttacgctgaattctgctcgacgagtcgtcaactcagcaaaaggtttcacagctgccggatcaatttgctcttggatcaagcgatcggcaaccgcaccggtaaataagattctttgattctcacgcaaatcagctgcttcatctaacgaaaggatatcggtcgtttccaataacccttctttaagaggtgatttaagcgttaattctgctttatcttccgtcgtccgaatccgcaaaccaaactttttttgttttaattgatgatccaatgtatcaaaataaagatttgtttgggtatgaaaggcggagcgatcaagctgatagaaggcaaagactctctgatattcttcacgagtcaacaatgttttaaattcgatttctacttgatgtgtcattgttttcctctttccttacagtccatcaagtttacataacgacgggcaatatgtcaaatgaaaacccttggaagagttgaagcaaaaaagagctctgttatttttcttgcaggtggcaccgattgaacattctgttttcctttaagattgtggtaaaatagaaccgtatgttatgaaaagaatcgagggatagaaatgattcgagattgggaagattttttggcaccatatgaacaagccgtctcagaactaaaagtaaagttgcggggaatccgcaaacaatatcgagaacaaaataaacacgtgccgatcgaatttgtcacgggtcgtgtaaaaccagtcgatagtattttaactaaaagcaaattgcggggaatccctttggatcgtttagaagaagaaatgtcagatattgccggcttgaggatcatgtgtcagtttgttgaagacatccatcaagtagttgatcttttgcgcacccgacatgatatgaaggtaattattgaaagagattatattacaaataaaaaagcgagcggttatcgttcctatcatttagtgatcgagtatcctgtccaattgatcgatggtgaaaagatcattttagcagagatccagattcgtacattagcgatgaacttctgggcaacgatcgagcattcactgaattataaatatcaaggagaatttccagatgaaatcagcgagcgcctgcgtcggtctgcagaagctgcctaccaattagatgaggagatgtcgaatattcgcgaagaaatccaagaagcgcaacggctgttttcacatgggaaaggcaatcataaggaacagcggcagggggatgaagtatgacagggatcaaagtagcaattatcaacaatcaagaagaaaagtcgatgcttgtcacaaagcgattaacagaattgttggcccagtctgacaatacgattgaccaagagaacccagaattggttatttcagtgggcggagacgggacactgttgtctgcgtttcacttgttcagtcatcgcttagcagaggttcgttttttgggggtccatacaggacatcttgggttttataccgactggcgagactatgaattggaagaattggtcgatacgttgtgcaatgatcgtcaaaagagtgtgagctatcctttgcttgatgtccgcatcacttataccaatgggaaatcagacaaacattttcttgcattgaatgaatcaacgatcaagcggggaaatcggacaatggtagctgatatttcaatcaaagaagatctttttgagaaatttcgtggagatggcttatcgatttcgacacctacaggctcaacagcttacaacaaaagcgtgggaggggcagtattgcatccaagtatcaatgcttttcaactagcagaaatcgcttctttaaacaatcgtgttttccgaacgttagggtcaccgatcattgtcggagatcatgagtgggtcaaagtcaaactacaagctagtacggactatctagtgaccattgatcaatttacgattgaacaggaagaaatcgatgcgatttattatcgtattgcagacgaacggatccactttgcctcctatcggcatatgcacttttggaaccgtgtcaaagatgcgtttattggagaaatttaacagttatggaatttacttatcattatgagcggcaagagccgcaacagttaaaatactttttgaaagagcaagggatttctaaaggattgttggcaaaaatcaagtttcaaggaggcaagatttttgttaatgaccaaagacaaaatgtcttgtattctttggtgcaaaatgatacggtaaccattgtgatcccagacgaaggtgaacatgaaacggtcttattagatgagacgccaatcgagatcgtttatgaagaccagcatcttttgattgtaaacaaaccagcaggcattgcctcgatcccggctcaatatcatcctaatgggacgatggctaatcgtgtcaaagcttattataaacagcaaggttatcaagatcaggtcattcatgtggtcactcgcttagatcgggatacatctggattgatgttgtttgccaagcatggctttgcccatgcgaagttagatgttcagctgcggcaaaagcaattgataaaaaaatatcaagcaatcgttgcgggacagattcaagaattggcttctcacggagaaatcacttatccgattgcacgagatctcagttcattattaaaacgaaaaacaagtttggaagggaaatccgcacgtacggaatattggttgacgaaaaaggatcagcaagttgctgtggttacgattcttcttcataccggtcgtacccatcagattcgcgttcattttgctgccatccattgtccattactgggagatgaactttatggcggtgcgatggatcttggcattgatcgtcaggcccttcattgttgcgaattggcttttacccatcctttcagcggcaaatcgctgcattttaaagcagacttgccggcagatatggcatcaatcaaacaagcaatgagtgaataaaagaggtgaagagattggatgaaaatcaagaacttaatgagcgctttgagcagctgactcaggcgttgaatgaaacagatatccaaaaatttcgtgaagtgtttttggatctgcatatttatgagcagggacaattctaccaatctctcgatgagtcgcagcgccaaatcgtttatacgtacctttcacccaaagagttggcggatatgtttgacgtgatcgaagaagatgatgaacatatgacagagtatctttcggaaatgcgtcccggctatgcggctgacatgctagcagagatgtataccgacaatgccgtcgatcttctgaatacgttagataagaagcaagtagcaaaatatttgagtttgatgccggcagaagatgctagtgaaatcaaagagctcctgcattatgaagatgagacagctggttcattgatgacgacagagtttgtttcgatcgtggccaatcaaacggtacgatccgcaatgtatgtcctaaaaaatgcagcagatgtcgccgaaacgatttactatatttatgtcgtcgatacggacaacaaactggtcggagtaatctctttgcgggatttgatcatcaatgatgaggatacgatgattgcagatattttgaatgaacgggtcatgtccgtgcatgtgggggatgatcaggaagatgtagctcagacatttcgggattatgactttctagctttgccagttacagattacgatgaccatttattagggatcgtaactgtcgatgacatcattgacgtaatcgatgatgaagctgccagtgactattccggattagccggggtcaacgtggaagaagtcagtgaaaatcccctcaaagcctcttcacgacgcttgccatggctgatcacattgcttttcttggggatggcaacagcaagcttgatcagtcattatgaagagcttgtaagtgaagcaagtattttagccgtttttatttcattgatcactggtacagcaggaaatgccggtacgcaatctttagcggttgcggtccgccgtttggccatctcagatgataaagaaaaaagctttatgcgaacggtgatcggtgaagtcctcacagggttagtgactggtgctgtcaccggtttaacgatttttgcgatcgtggctgtctggaaacaaaacccgatcttaggttttgttattggaatggcgatgttgtgtgccattacggtagcgaatctcgcaggaagtctgattccaatgttaatggataaattaggctttgatccagccgttgccagtggtccattcattacgacacttagtgatttgactagtgtcttgatttatttcaacattgctagcttatttatgaactattttattcgttgaaaaaactaggtattcctttcaatcaaagtagatccattcatcaaaagcgaggcgcctcttttctataagagacgcctcgcttttttgtcttattcgtatcgatgatgggaccatgatggtaaatttatttttgcaacttgggaataactgacgaaggagaaacgccaaaaagttttttaaaagacttgctaaagtgatacgcgtcttgataaccaacagcagaagcgacttctttgatcgtgagtttctcgtttgtcagcatatctctcgcacgttttagccggatctcgattaaataattgattgggctgactccagtagcctctttaaaaacttttgaaagataggttggactgagaaactgatcttgtgcgagcttttctaaagtgatttcttctttatagtggttctctaaaaagtagatggtgtagttaacgatttgttggtggcggcgttggcttttcgtgagatagggaaccacattcaaacgtttgtcgtttaagcctcttaatatatagaccagcatctcgatgatcaatgctttttgcattaattggaattcatcttgctcctcattactctcccgaacgagctgccacgctttatctaaaacttggtggtggtattttcctaaatccagtaacggttgcttgttggggaaaaagttgcgtttgaatccttctaaagaaatattctttaagccaatatgcagttggtgggaacaagtccctgactcctgaaactcacaatgattgacaccagggttaaacaacatgatactgcctgccttgattttagtagctggcgcctcttcaaaataataattgctttctccttccaaaacgatactgatttccaagaaatcatggtgatgcatttctccatgactttcagactgtgtccaaggatcaaacaagtagataatttcgggattaaaggttctgggatttactagattcattcatttatcactccaatggtgtcagaacctggtaatttcaggtcgacggcttcttagtaatattttacatcaaaatgagtaagaaaaaccattttaatcgcctagtaaatcgctaagcttaacaacgagagggggaattagatgagtaacacacaatggatctggcgatatgcgaaaaaaaatcgtggccgaatcattttagcaatcctgtttttacttattaatgctgcgttgatcgtcgtcaatccatatctagggggaatggtgatcgatgatgtgatcaatcagcagcaaacgcacttattgattccattattactgattatgatcgcaacgacagtgatccgaaccattgtccgctatgcgtatcaactattatttgaacgagttggacaaaacacgctctatcatttacgagaagatttgtatcacaaactgcaagaactggattttgacttctttaatcatacgcgagttggggatattatggcgcgtatgacaggggataccgatgctattcgacactttgtttcttgggtgacctataatatagccgaatgttttttgtggtttttctcagccgtagtggtcatgagttttattgactggaaattgatgcttgctttagtcgctgtgacgccaatcatctttctattaacgaatcaaatgtcaaaaaaagctcatccattgttctttgagattcgggaaagcttttctcggttgaattcgatggtagaagaaaatattggtggtaatcgcgtcgtcaaagcatttgccagagaaaattatgagatcgacaagtttaaagcgtacaaccaagatttcaagacccgcaacatggcttctgccgaagtatcccgaacctatttgccttggttggatggattagccggaagtttgaatgtcattgctttggtcttaggaggaatctttgtgatcaatggagacatgacattaggtgatctagtggcattcaacgggtacctatggatgttgaataacccgatgcgaatgagtggctggctgatcaatgatgttcaacgtttttctgccgcctgtatcaagattcgtcaaatgctcgcacaagagtcgaaaattcctgtccatgaaaagaaagccttggaaccaatcaaaggctttgtggaatttaaacatgtttcctttcatttttccgatgatccggatcaaaatgttttggaagatgttagctttaaaatcggacctgggcaaacgttagggattttaggtgaaaccggctctggtaaaacaacattggtcaatcttgtaggccggttttatgatcctactgagggtgaagtgctgattgatggcaaaaatgcgaaagaatatccggtccgccaaatgcgggagaacatttcaatggtcatgcaagatgtattcttgttttctaacacgatctctgacaatatcgcttttggaaatccgttggcagacgaaaactttatccggcaaatggcggtggtagcggatgccgacacctttatttcccgaatgcctcaaggttatgaaactatcgtcggtgagcggggagtaggcttatccggtggccaaaaacaacgtatttcattggcacgggctttggcgaaagatccatcgatcttgattcttgatgataccacttcagcggttgacatggagacagaatccaagatccaacaagagctaaccaaactaactggagaaaaaacgactttcatcattgctcatcggatctcttctgtccgtgaagcagatcaaattctgatgatggaaaaaggacgcgtgatcgagcagggaacccacgaagaactagttgccaaaaaaggcagatacttcgaggtataccaaaaacaattgggattgactggaggtgacgacaatggcgcgcaataaatttgatgtggatgaagaactggaacaggagttcagttggaaagactttaaacgattggcccgctatgtcgtcccttataaagcgagtatcggtaaagttctctttacgatcatcttagccaatttggcgggaatgcttgctccggtatttacaaaaattgcgatcgattcagctattcctgaccagaataaaatgcagctgtttttgatcggtgctgcgtttgttgtgacactgctgatcattggactgtgcatgcgttaccggatttatcatattacgaatattggccaagacgtcttgaaagacatgcgttacgatatctttgaacatttacagcgcttgcctttttcctattttgatacgcggcctcatggaaagattttgatccgtgtggtcaactatatcaatacactgagcgatctattaagcaatggactgatcaatctgatctccgatgttttcaatgtagtgatcacactgattttcatgttagtcatcgacgtcaaactgacattgtattcattggcactcttaccgatcttgttcgtgatggtcatggtgattaaaaataaacagcgcaaagcttatcaagttttaagcaacaaacagtcgaatctaaatgcgtatattcacgaaagtatcgctggtatcaagatcactcaatccttcgcccgtgaagaagaaaatgcccaaatttttgaagaagtcagcaatgattaccgtacatcttggatgaaagctgtcagagtccaatttttgatgtggccaggggtgcaaaacatctctgtgatcactacttgtctgatttactttgttggtattcgtcaaatcggtgttgatgtcagtactggcacgttgattgcttttattagttacatcaataatttttggaatccagtaatcaatatcggaaatttttataattcactgatcacggcaacggcgtaccttgaacggatctttgagacgatggatgaagtaccggatattgaagataaagctgatgcgatagaattgccgagcatcaaaggggaagtggctttcgatcatgtgactttccgttacgaagaaggcaaaaatatcttgtctgatgttaacttccagattcaggcaggagaaagtattgcgttagttggtcctaccggcgcaggtaaaacgacgatcatcaacttgttgagtcggttttatgatgtgaatgaaggcagtgtcaaagttgacggttatgacgttcgggatgtgaccttggaatcattgcgctcacaaatgggtgtcatgctgcaggatacttttattttctcggggacgatcatggaaaatattcgttatggaaatctggcagcaaccgaagaagaaatcatcgaagctgcaaaaatcgttcgagcccacgagtttatcaaggagttgaaagatggttaccacacagttgttgaagagcgaggaagtacgttatccgcagggcaacgccagttaatttcctttgcccgagcattactggcagatccaaagatattgattctagacgaagcaacttcaagtattgatacaaagactgaagagctgctgcaagaagggcttttaaaacttctggaaggcaggacgtccttcattattgcccatcgcctgtcaacgatcaaaaattccgaccgtattttttatgtcgctgggggaaaaattgctgaatcgggcaatcacgaccagctgatggccttaaaagggctctatcatcacttgtaccaatcacagtacgatttgttgcaggcgatatgataaatggtagtaggctttgcgcaaaaaaagacattcgtttatcagcgaatgtcttttttgcttaatgatctgtcaaatcaacgattttcgttccgtggagttcagagacaccaagctgatcggcaattgactgggcattcttgtatgaaatacctgcacctggtaaaataatcaagcggtctcctgcatagtcgatcaatgcttttaaccgttctaagttctcttcgatagctgttcctgctggcccgccatgtgtgaggatgcggtggacgccgtgatcagcaagccaatcaatggcttcaaattggcgagattccggaatggcatcaaatgccatgtgaaaagtgatctgtaatccttcagctgtatcaatcagaagttccagtgcttcctcatcgagccagccgttcggtgtcagacagccaaagaccacaccatcagttcctaatttcttggcttcgatcaaatcggtgtgcatgatttttaactcgatgtcattataaacaaaatcaccgcctcttggtcgaatcattgtcatgatcggtacacttttttcaccagcgtaactcagtgcttcttcaatcacacccgtgctaggtgtggtcccgccgacagccaaattgtcgcataactcgatccgttttgctcctcggccgatcgctaatgggatcttcgtataattttcggcacaaaattcttttaacatctgtttccctccgtttttcagctgttattctatactagcattttaccataagtctatgctaaagtaagaaagagaagagggatttgatatgttaaaaaaaatcgatcgtgggcgactttttcttgaggcccatagcgacttatttgagtgtccattgtgtcatcagcaggtctttgccaatgagagtggactgatttgtctgaatcgtcatcgttttgatctttcaaaaaagggtactttattttttttggatcatcctgtgaaaacggagtatgatcaaggaatgtttgttcctcgaagtcggatgatccaaagtgggatgtatcgtccagtcttagagggcatctcccaccagattgaacaatccgaaaacattttagatattggttgtggggaaggcagctttcttgcccaattattagccggacaagaaaaaacggcagtaggatttgacattgccaaggaaggcatctatttggcaaccaatcatgctgcttctgccttttggtgtgtcgcagatctcacgaatcttccttttgcccccgctagttttgatacgattttgaatttattttcgccttccaattatcaggaattcgaccgcatcttgaagccgggcggacaagtgatcaaagttgtgccagcagcaagctaccttaaagagctgcggcaagctttttatccagatgattctgcaaaacaagtctattctaatgaacgtgtcgttgataaattttttgcaaaatatccgcaagcgagccgagaacggatttgttatccattctcaatcccagaagaccggcgactggacttgttggcgatgtcgccattggagtggggtgcgtcaaaggagcaaatagcaaaagttcgggaaaacccgttacacgaaataacagtcgatattgagttgttagtcgcgaaagtttcttgaaaaatttttgaacttttttgttatttacccttgcaatcatgtcatgggagtgatatattgttcttaagtcatttttcattggtttttatcaggttcctgttctgataaaagttagtgaaaagagcttcactaacgtaacgactcgcagtgattgacaccgagttggtacgtttttttttatgctcaaagtttcagtaaatcagatagaagttcgcaaaacgattttcgttaaaatatggtactatagaatctattgagagacagttggctcgaaccaattgaaaggagtcttaccagatgaatcacattgttttatttgaaccacaaattcctgccaataccggcaatatcgctcggacttgcgcggccaccaatacacatttacacctaattgaaccattaggcttttcaacagatgataagcatttgaagcgtgctggacttgattactggcatgatgttcatattacttatcacaaagatttagcggcatttatgtcctttttaggtgatcgtccactgtacctgatctctaagtttgccaatcgtgtctattctgaagtagattatacgactcatgaagaccaatttttcctttttgggaaggaaacaactggattgcctgaaacattcatgcgcgaacatgcggacaaatgtttacgaattccaatgaatgatgcccatgtccgatcattgaatttatctaacactgccgcgttgattatttatgaagctttacggcaacaagggtttccagagctagaattgactcatcactacgacaatgacaaattagattagatacaatcgataggagagacttgttcgatgcaattatattttactcgtcatggcaaaacagaatggaatcaagcacgacgatttcaaggaatgatgggcgattcaccattgttgcctgaaagttataaggagatccagcttttgggagacgcaatcgcaaatgttccttttgaaaaaatctattcaagtacctcgttacgtgcccgtacaaccgcacaagggatagtggaaagattaaagcaaccagtcgagattgtttatacagaaggattacgtgaacttggactaggcgatttagaagggcagttcattgatgaaatgcaggcaaaatacccgcaagagctggctgatttgcgccaccatcttgaccgttatgacccaacgatatttcaaggagagcccatcgaagatgccctgaagcgcattgaaacagtggtgatgactgctgtgcaagcccacaatggtccgttactttttgtcggtcatggggcctcattgacggcagctatccaatggttggccggaaaagaattggcacaattgcgggaacaaggtggtcttgttaataatagcttgaccattttagagacaggagcagataaacaattgccttttgagatgacctgttggaatgatgcaagttttctagaaaatcaagacagtttagatgccttactataggtgaaaggagcggcgtcgtgaatccagaaagaacattttttgtcggccatgttgccgcgatcttttttcaaaatcctagcaatttctataaggtacttttagtcaaagtgacagaaaataatgcggattacaaagaatctgagatcgtcgtcactgggagctttggtgagatccaagaagaggagagttaccgattctacggtgagttagtcaatcatcctaaatatggcgtccaattaaaagtggacagctatcagcaagaacaacctacatcagagcaaggtctgatcaattatctttcaggagagaagtttcctggtatcggtaagaagacggctgaaaaaattgtggggcttctaggagatcaggcgatcgatcgcatgttagaggacccggtattgttggagcaaattcctggattgaatgaaagcaagcgaaaaatgattcttgatacggttcgactcaatcatgggatggatcaagtgatcgttgggttaagccgctatggatttggtagtcagctttcttttgccatttaccaagcatacaaaaatgaagcattagagatcatccaagaaaatccttatcaattagtcgaagatattgaagggattggcttcaaacgggcagataacatcgccgatcaattaggaattgaagccacctcgccccagcgctatcgtgcggcagttttgcaccagatttttgcccaatctttacagactgggaacacgtatattcacgcacaagatttgcttgagcaaacacttcggttgttggaaacgagtcgacccatcgaaattccaccggatgacttggcaaatacgattattggattggtagaagaaggcaagatccaacaagaagaaacgaagttgtatgaaaacagtctctatttttcagagtgggggatcgccaattcgatccaacgattattagctcgcaaaaaagaaatcaactaccccaaaaaaacagttgaaaaaacactgcgaaaaatcgagaagcgattagggatcgtctatggatcttcccaagaagaagccatcaaagaagccatccattccccattatttattttgactggcggacctggaacagggaaaacgacagtaatcaatgggatcgttcaattatttgctgaattgaatgatcttgatttagatcccgcaaaatacacggaagaaatgttccccatcttgttggcagctcctacaggtagggcagccaaacggatgaatgagacgacgggacttcccagtgggacgattcatcgtttgcttgggcttaacggccgtgagaagacgcctagtgtcgctgcgaaagaacttgaaggcggtttgttgattgttgatgaaatgtcgatggtggatacgtggttggctaatacattgttcaaatcgatccctacaaatatgcaagttatttttgttggcgacaaagaccaactgccttcagtaggaccgggacaagtgctgcatgatcttttagaaatcgaacagattccaaaacaagaattgaccgagatctatcgtcaaggagatgggtcaagcatcattccattggctcatgcgataaaaaatgggcaactgcctgcagactttacccaaaatcaaagagatcgctctttctttgcttgtgatgcttacaaaattgaaccgttgatcgcacaaatcgtgcaacgggcgaaagcgaaaggcttcacaccgcaagacattcaagttctagcgccaatgtaccgcggagcagcagggatcgatgcactaaacaagatgatgcaggaaatctttaatccaaacgatgggaccaaaaaagaagtcacttggaatgaaacagtctaccggatcggagataaagttttgcagctggtcaattcgccagaagacaatgttttcaatggggatatgggacaaatcgtcggcattattcctgccaaacagtcagaagacaaagtggacgaattagtgatccaattcgatgccacagaagttacctataagcgaaatgaatggaataaaatcacattatcctattgctgctcgatccataaagcgcaaggaagcgagttcaaaatggtgatcatgccgatggttcatcaataccaacgaatgctgcaacgaaatttactctatacggcagtgacccgcagcaaagagctgttgattttattaggagaaccccaagcttatcaaacatgtgtgacacatgagtccgccactcgactgactaccttgcaagagcggatcaacggcagcgacgagatgacacctttgcaacgtcaaaggttggcacagtttgaagaagcagatgatcctttctcagagtctaactcacagacaacagccacaatgaaaagtgaaaagaaaacagatactgcccgtgagccggtgagcagtaagcagtcggttcagaaacaggaacttgatttgtttgccacaacaccgagtgaatccatcatcgaagaaacactaccggaaggaactatctcaaaagaaccgctttcgagagaattgacaatcgaaatggttcaaaaaaatgtggttgatccaatgattgggatggaaaatctttctccatatgattttctcgtctcttaaaaaagaattttttacagttaatgaaaatgagcgctttcttttggttttttagcgaaacatgctaagctaataccaaaaggaggcgttttcaaatggcgaaagaaacagatgacaaattagaaaaattagcaaaagaatccagcaataacttcaagaaattggatgagttggagaaagaatacaaacttgatgaaagtccagatgccgaaaacgagcaaggagaggaaaccgagttagagaaaaaattagacaaagttccgccagtttgggcaccaaacacaaatccgactaacccaaccaatccgaatagttcaggaagcatttaaggctgaaatcaaaaaaacgcgtaagaggagattgcctcttacgtgttttttattgtaaatgctggtaataataaatggctaactgggtacgatcccgaagttctaatttttctaataacttactgatataattgcggaccgttccttcgctgagaaacaacgcttgcgcaatttctttattgttttttccagtggcaatttccttcaagatcattttttctcgttctgagaaatgagtagtcaaataagagtcattattttttaacagtgtaggaaatttcgtgacgatttcagcgccaaacactgcttggccattgtatgcagctttgatagagggtacaatagccgaaagattttgcttgatgagatagcctttgactccgagatccaaagcttctcgtatataggcatcatcatcaaaagtagttaagagtaaaatgacggcattcggatcccgggttaaaatcttgcgagcagcatctaatccagtcccatcgggcatccgaatatctgttagtataatcgcaggttttctttcttcgtacaatgcaactgcttctttggcacaatgaccaatgcctgttacctcaatttcgtttgaaacttccaagatggtttttaatgatgcggtaactaggggatcgtcatcgatgattactacttggatcattggtcctcctccttaggtaaaataatcgtaagttgaaataaattctctttttcaagggcatggagttgtccgtttacctggttgattcgctggcgcatcgtctgaaaaccgatcccgtgggtgtgattgagcctatcctttggtttgtcattcttgatttgtaatcgatgaaaagcaggtagttgtttaaaatcgcaagtcacttttgttgcttgactgtgcttcatgacgttggtcaaggcttcttttatgatcgtgattaggacagtttgttgtgtttgagagagaatacttggcggtgttcctattacctcaactgtacaaaattgaaagtctgatagcaaaagatctaatgcttgtggaaaaagaagcgagtgatgatgtaaatcgtgaacactttctcggatgcggtccatacccaagttcatggttcggttcaattgatccaatggtaagtgaagttgcttattttgattaattgcttgaatggcacctaattgtaagatggcacttgaaagcagatgaccaacattatcatggatatcacgagcgattcgattccgctcttcagcgatctgtaaggcgacttctgtttcttgagagcttttaaggtagtcgttttgctcacgcaatcggctctcattttcccaattggcatcttgagtcgagttgaattttttttgtaacgaatgaaattcaaaactatcgtttcgcaagtaagaagcagagtagaccaaaagcatcagtataatccgtatcggccaagaaggaaccaaggaaaataagagtatacaaagaatgagcaggaggatcttttcttgcttttcaccaatctgggctgaacgaaagacgcatgggaaaaaatagctataaattggccaaaccaaactaagacctatcaaaatgcccaatgccagccacgttccttttttgaatagcagacagagaccacttaagatgattgttgtcaaaagatagattaagtctagggcttggaagccattcagggacattagccctccacagagaagaaaataaaaaacaacctcattaatcgacaatggtttattcatatctggctcctaaataatgacaaatgtcatttttgttttggcgtatcctcactagttattcttttcgctttttattatagtcagaataagaagtgtttggaaaggagttttttcgatgattattgaaattgataacttggtaaaacgttatggtgattttctcgcattgaatcattttaatttgcaagtcagggaaggtgaagttctcgggcttttaggacctaatggaagcggcaaatcaacagctatcaactgtatgttgtccttattatcttttgataaagggactattaaattgtttggggaaaaaatgtcaccgacaagttatgaaataaagcaaaaaattggcgtcgttccgcaagatatcgctgtatttgaagagttgactgtctacgacaatgttgattacttctgtggtctgtatgttgctgacaagaagaagcggaaactattgatcgaggaagtcatttcgcttgtgggattagaagagttcaaaggattctatccaaaacaattaagtggtggcttgaaacggcgtttaaacattgcttgcggcattgcccataaaccacaactgatttttcttgatgaaccaactgttgccgtggatccccaaagtcggaacaaaattttggacagtatcaaaaagttgaatcagcaaggtgcaacaattgtttatacgactcattatatggaggaagtcgaaatactttgtgatcagattgtgatcatggatcagggacaagtcatcgcgaaaggaacaaaagaagagttgaaggacatggttcgaagtacggaaaatcttgtgattgatatccctttacttccagatacagcgatcgaatttatcaagtcattgcctcaagttcttgaaactgcctatgataaagagcgtttgacgatcacagccaaaaagatgaaagagattcttttaccagtactaagctatttggaggatgaacatatcgcatttactaagattcacacaggagaagcaacattaaacgatgtgtttctggaaattaccggtaaagaattaagagactaggagggagattatgtttggacacttatatcggtatcgcttgaacgttttagttcgtaataattccttactattttggacattgatcttcccgattttattagggttgatgttttctgtagcatttagcgagattgatcaagctggaacgatcgagacgattcccgttgggattatcaaagaagaacaaaatcagaaaacaaatgagggacaactgactcagcaagacgcatttatgaatgttttgaagcaaacaaaatctggtggagaaccattgttttcactacaagaagtctctcctcaagaggctgaaaaacgattagatgcaggggatcttgctggatattattcctttgaacagtcatcgatccaattggctattgcacgtaccggtctttctcaaaccattctaaaaaacatgatggaccgatttttacaaaatactgacctggccaataagttggtggcaattgactctactttgacagaagaccagctcacatcttttctagttggagaatcttttgttcagcaagaaaatcagactagaaacatgagtatcaaaagtttttatttctttaccttggtgggaatggctattttgtatggattcatgtggggggtcagaaacgcccaagaccagcaagcaaatcagtcttccaaagggattcgcctttcgatcatccctcgaaaccggttgctggttttttcagcaaatatccttgctggattcacgatatttttcttagaagttttagtgattctaagtgtttttcattttatttatcaagtcgacttcggaaaccgctggcagtggttattcgtcctatccgctttgggtgcattgaatgcattattattagggaatttggttgggaatttgcttcctaatatggggctggcacaaaaagaaggattgggtgtggctgttacaatggcgatgagtttttttgctggtatgatgggctcccaagacatcaaatactggatcgatctgcacattccggtgctaggaaaactgaatcttgtcaacttaattagtgagagtttctatcagctctatttttatcgctcactagaggatttctatttgaatcttttctggttagtagcctttatggttatcttagcctttagtaatctaatgtttgaaaggagggttcaatatgtcgctgtataaagccgttttgaaaattttaaaagcgaacaaaacaaatttgttgattgcagtcattgtaactgtgatcatcaccttcttctatgcgcaaaatacagcagcaccggatgcaaaattggatcgggggacaatgaccattgttacagaagacaactccgcattaagtaaagcactgattgactatttaaaagaagaacaaacggttgtggaattgtctgataagagccaaaaatcgattgatgatgcgctgtattttggaaaaatcgactatgttttatttttgcctaaagattttactacgaatattgaagcaggtgtaccgtcagcaatcgatgcacaatctcgtcccgatgcttttgctaaaacattgattgaagggcaagtagatacctttttgtcgacttatacggctttttatcatgtaactggcaatagggaagaggcattgaaaaatacgcaatctactttggccgcaaatggcgaagtaacgattagtcgtggatacagtgaacggatgaaccagcaattcggcagcttagtattcaatgcacttgcttacggtttgtttctttctatttttagtggctatggcgtggtcaatctagtgttcaatcggaaagaaatccggaatcgcaatcaagtatctcctttatcaacacggcggttgaaccgagccgtttctattggtatgttggggtattcactgcttctgactagttgttttacagcgggattactcctatttactcgtagcacgtggtccgtcatgaccggctatctagtgattaatcttttgtgttttttcttgccgattgtcacattttcaacgtgtattacgtcatttgtcaaaaatagtgaggcgttgaatggaatttcgaatgtgtatattatgggaagctgttttttagggggagtttttgtttcatcagattttttaccagactttattagtaagatcgcttcttttacaccgacttattggtttgtacaaaacaatcaattgattgggaacaccctctctgtgaatgcggatttcattacgaaattctggttgaactgcttgatattggtcttatttgcctgtgcctttttgataatacagttcgttttgaaaaaagacagccgctggtttaatcaaaaaagggttgcatgagtcataaaaaaatgatgccgctgactcaacagctgcatcatttttctaatctcactatttctaactccatatcaattgtttggtagtggttatggtgatatcaaatggccgcttacccatttcttcgccgtcttcttgaccatgctgtggtactgtggagacgattcggagcttattcgtagataaatgatggaagtagcgagatctcatttgtttcttgcgggttagtaaggctaaaagccaaaaaattttgaacaaagcgactcgctcaacgagaacgaaatcgatcttatcttcgttgaggtttgctgtaggtgcgatcgccacaccgccaccgaagtaggggtgatttgtcgttgtgcacaagaaagcctttgtaaaattcaattgtttcccattggtttctaccaggatgggaaatcctttttgccggaataagacattcactactgcagacaagtaggcaaatgaacctaaattgaacttgtttaagtttgatttcgcagcagaatgatttgctgcgtaaacgatcgatgcatctaatccaataccgatattgttgattgcgaacccagtttcatcttggatttgatcatgatacttgatgatcgtaaccgattgaggagtagcggtcccagcgattttccaaaatacttgctctggttccttaggtaaacgcattcctctggcaaagtcattccctgatcctgccggaatgtagcctagtggaatatttttttctgattcttgaagggaggaaactacttgatgtaaggtgccatcgccaccgatcaccaccagtaaggggtaaagcatttctgaattttctcgatagatgtcatcccatggcaacaatacttgtgccagtaaagaagtagtaagttcctgttcttgcccggcatattctgtatagtagaactgatggggaaaacgccgcttcttgacgattgcttcaatttttttggctacttttaggccacgtccactgcctgcttcagggttaacaacaaaatgataataatatttcatacaataaatgctccatctaatctaaaatcaatgctgtttattatagcacgattgctgacaagtttggctagtgatgcttaactattttttgacaaaaaaatagattcgacgaaaggtacgtaacaacaagctactattttcgctgttgtttttgtgatctaaggttcttatgtccactatgatcacatccgtattgctcacattcgccgaatcctattcaattagtaaggagtaactcaaattcccacatcctttgtctgtttttctaagttgacaacaattcttttcttgcagatccttcatcgtctgctttactgggaatccttgctccttacacttatagtatagcacgaaaacggatagaagcaaccgcttacatggtctttgtcactatctttagataaatttaaagatatcaaaagacagcactcttgaacttattagccattaagtcgatgaacaatgaaggtgtacgattcccctcataagcaaacaggaacttagaggaaaatgaacaattgaacgattcacagacatcaagtttacatgaagttggtttgacgaataaagagacggatgtccgtctctttgagttctttatccaagtttattcaatatagctgatggaacatcattaggcgagacttcttcccatcccattactcctttatgattatttacatgtaatacaaggtatgcattctcttttagtggcttgtctccataggaattaaaagacacatctttttcattattgtctgatgtatagctagctaagttgtactgtatctaaagtgttctctcccgctacctctaccaatcgaaacgcgttcacctttcgaagttatcttagtgtagtaatctgtcgttccataagattgctcataccagaaccagcctccacccatcagaagaagggttactacagtaaaagataatagttttttcatataaaatcattcctttcgaggaatagattacatctatgaataatgaaataaatcaatctaaaggctgagaataagcaaacaaaattgtaaggaggacaatgagaattagtaggagaggaagaacagaatgaattgcgagcaaataaatactcaatgctcgtctttggcctattttgctggaagattcctattcaaagcagaaccaccgttttaatggttatgtatttaaaatattctagtcatttccggtatcttttttagcctcgctgatagatagatcgttcctctttctttttttgttgattttaacactttgctatttgacaagtgggttgctttagaaggagattgtacgaccttgttactgaagaacagcttgggggaaaataggtttttagactttcatccacaaaacatccacatgaattctccaatttaattggacaatggaaatcaataagaaccaaatcaataatgtaagcttgataaatcagtaatcttctgtataataattatttgtgcgtaacgcatcgcggttcatcaaccatcccgcgtaatcaaaactcggagaaagaagggatcaaatggataaatcatccactttatcaaaccagcggttgcgagttgtcgtcgcgaacggtttgatcatggcactgtatgttgcagtgacagtcttagtcgccccagtggcttctggtgccattcaatttcgtgtctcagaagggctgaatcatctggtagtctttaacagaaaactgatgtggggtgtttttggcggagttgtattgtacaatttattttttggtatgggaattttggacgtcgtctttggtggaggccaaaccttgcttgcattgtcagcaacggcgctattgcagaagaaagttccgaatgtctttgtccgtttagcgcttaatacgattttcttctcgttgagcatgttcttgattgcaatcatgctgcatctgactctcgcattaccattttgggcgacctttggtacaacagcgctaagtgagttgattatcatgacaatcacagcgcctataatgtatatcgtgaatacaggtgttcgcttcgataagcgattttaatcaatcatttgttttttgctttgatggttcccaaaaaacaaataaaaaaagatcatctctaccaaaacctacggtagagatgatcttttttgttattctgcattcaaatcttcaatttcaacaactttgaagttttttgcctctaactgataaatgatcttatcgcacagctcttttgacgtattcgctggtaaagtaatcaatgtccgacgaataaattcatccttgccgatgtccaatgtgatacagctggcaatactgctgtatttcgcgatgatttttgaaatgatcgctaagtcaccttgtgtgccagttgatgcgatagtcagcacgtagctaccttgttcgacattccaagattgagacagcatattcaataatgaactgtgggtcaaaatcccatagaactcattgttttcatctaatacggcaatgtatggcaattctttgatcgtgaaaaagactttaaaaaatgaagaattgacataaataaattttgtcgcgtttttaagcaggtgtgtcactggtaatgtcatatctccaccattcgatttgtgacgatagatgtgcattttatagatgtttccccggaagattttgccggattcatctaagatcggtacacagcgatagccagaatcttctaaaatttccaaggcttcttctaaagtagctgtttctttaatcgtagttaagtcgcgttttttgtaaaccattgtttttagtaacataacaattccctcccaaatacccaattcacatctctataataccataaaatcagcggaaactatatttttgcgtgtcaaaatctaaaattgacactttcactgaaaaatggtatttttaactttggaaaactttgtataaagggggaggacatcagaaatggcaacaaaaaaagcagctttggcttgttctgtctgcggatcccgcaactattcgaaatcagtcagtgaaggaaaaaaaggcgatcgccttgaaattaacaaattttgcaaatactgcaatcaatacacgctacatcgtgaaacgaagtaaggaggaatcttgatgaactttatgaaaaatgtttttgctgaaatgaaaaatgtttcttggccatcaagaaagcaattacgcagagatacttttgttgtgatccaaacgacaattatttttgcagtgatgttttttgtgatggatacgctgattcaaactgtttttgatttgattttgaaataaatgctgctggattatcagcaactagtcaagtaaaacaaatcgtggtataattgattcgaggaaaaacttcggtgcaactgaggtttttttattttacaaaaagatagggagaccgaatacaatggaatcttttgaaaaaaattggtatgtcttgcatacttactccggctatgaaaacaaggtgaaagcgaacttggaatcacgggcgcaaagcatggggatgggcgattacatctttcgtgttgtcgtaccagaagaagtcgaaacggaagaaaagaatgggaaaaagaaagagatcgttcacaaaacttttccaggttatgtcctcgtcgaaatggtcatgacggatcaatcatggtatgttgttcgtaatacaccaggagtgactgggtttgtcggctctcatggagcaggaagcaaaccagctccgcttttacaagaagaaatcaactctatcttacgttcaatcggtatgagcactcgaacagttgaattggaagtggagattggtgaaacagttaaaatcattgaaggtgcattctctggattagaaggacaagtcgctgagatcgacgaagaaaaacaaaaattaaaagtcaatattgatatgtttggtcgagaaacaagtacagaattggattttgaacaagtagataaaatctaagtataaaactgtagtgttttttgtcaaaataaggtaaaataaaattgaaaattggtgatagcggaccgttattggcccgctgtttttatctcacgaaaagaaagcgttttataaaaagggggtactatgaagaaaattctcgcatcgatttgtcaacgccatttttttgatcaacatttggaaaaaagaggtgtgatttccgtacataatggttatagtttgttgtttgcttttaatttgtttttgctgctttctgccgtgatctttatggaacctcaaaaagtgtttcgtgaaatgcttacaatcatgttctcggaaagccatttagtaacggattacgttgcgctgacttctgtaggtggcgcactgttcaatgcgtcgatcatgacttttgttgcgatcgcggtctgttaccattaccgagttccggttactggaggaatgatatcagccgtcttcatggttacggggtatggtttgtttggcaaaaatctgttcaattttattccaatcttcttaggtgttcgtctctattcctatttaatgaatcaacccctcaaaaaatatcttctcattgctttgtacggttcctccgtttcacccatcgttagtttttttgcattcaatgactcacttccagcttatttcggtagcttcatcggttatttgatcggtgttttgactggattgatcatggttcctttagcactgcattttcaagcattatttaaaaaagtcagtatctatagtgccggctttacttctggcatgttgtgtacgatggttgcaggaatttgccgaatgtttggttttgatatcgaattgcgagcaatcgtttctaaaggctccaatcttccactggttattatgatggtgtcgctgtctttattaatgattggctatgggttagcaatggctgttaaacgcaagcggttgaacatgcgggcaatatggtctcatagcggcaaaatcgaatacgatattttacgtgaaagtggcgtttataatacgatgattaatatggggttaatgggattgctgttaatgagttatgtgagtatgctaggtgtcaatctcaatggtcccattgcaggtgcgatgttttgtgtcattggtttttctgcttgtggtgcccatgtctttaacgcgctgcccttatttgccggtgtgctattagcaaatacaatgaatatctacgcaatgactgaaacagtaaccgttacagcggctatttttgcaatgatgctctgtgcggtgactaatgcttacgggtggaaaggggggatgatcgtgggattcattcatacgtcgatggttttgaatatcgatgtgcttcatggtggattgaatctgtacaataatggcttttccggagggctcgttgcgatgatgatcattccattgctcgattttttttcacaaatcgcggacacctcgatttttaaacggaagaaacagtccggaggcaaagaaaaggtaacctaccaagcaacgagtaaagaatgaagtgttcttgaataaagagtaaacattagctattgcttgtttcttgtttcaaaagggattatactagacccgatttggagggactgtaaatgaaaaaatggctatttctatgtctggttgttttgcttagcggctgtcaagcagcaactcactcaaatgtttcagcacaaaaaagtacacagaagccaacggagacaacgactgcttcggcagaaacatcaaccaccgaacccgttcagaaaacgaccacgccaacactctttattcatggttatcaaggaggtcccgcatcatttggagggatgatacagcgttttgcccaaaaagattgggtgagcaatgaaatggttctaacaatttcaccagatgggacagtttcaacggaaggagtgctttctaaaaaagctgtaaatccaaccattcaggtcttgttcgctgacaatcaaaataatgaatggaatcaagcagaatggatccgacaagcgttgctttatctgaaaaaggaaggaatagagcaagtaaatttagtcggacattccatggggggagttagtggttttcgctatctcacaacatttggagagctgagtgcagctggggctgaagcactggatcccgcattgccaaaagtagctaaatttatagcgatcggggcgcctttcaatgaatttattgatacgagttcacgacagactatcactgatttagtgacaaacggaccaacggaggcttctccacgctaccaggaatttcaaggactattgaagcaaggggggcatcgactcccgattgagctgattgctgggcaattatctgatgaagagctatcggacggcactgtgccgaccacaagtgccttggcgatcaaccatttattggcagcgaatggctattctgtgactgaaaaaatcattaaaggatcacaggcacagcatagtcagctgcatgaaaatcaagaagtagatgaagacattgctgcttttttatgggagaaataactgatagtcgtcaaaaagctgtaagaataactttgatataagttctatctgtttttttagtagtagcaaatagataaaaatatccgaatgatcggagatcgcttattcttctcgtgcataagtaacgaggacctgcagagccgcgggtgctatctaatgatcattcggatatgttatttgttgagactcttacatcttttagtgttcagcggcatctaaaatttgcgcttgtagacgttgtgctgtaggcgttgtggccaacccgccctcggctgtttctttaaaaatacttggcatttgccgtcctacttggtacatcgcgtggacgacctcatccggaggaatcacactttcgattcctgctaaagccatatcagcagaaataaatgtttgtgaggaaccgagagcatttcgcttcacgcaaggaacttcgactaacccagcgacaggatcacaaatcaatcccatcatattctttagtgtaatggctactgcttgagcagcttgatgtccgctcccacccttagcacagacgagggctgctgctgccatggcactggcagaaccaacctccgcttgacaaccgccttctgctccggatatcgaagcattgttcgcaatgactagtccgaaggctccggcagtaaagaggaaatcgatttgttgagaacgagacagctgcaaacgatcgcgaacagccatcagcacaccagagacaacaccggcactcccagctgtaggagtggcacaaatcaatcccattttggcattgacttcattgacagcaatggcattttgaacggcttgcaagatcgtctcaccacttagaaaatcaccagcctgtatataatcattcattcgtgtggcatcgccaccggttaatcccgtcacagaggtcactccagcaacgccctcggcaacggattgttccatgaccgtcaggtttttgtccattagtgcaatgacttgctcgcgagtgcgccctgagttttcgcattcgaccgcaatcatcatctctgcaatcgatgcataatttttgctttgaagaacaagatcttcaatcgtataaaacatgacgaatcctcctttaatcgaaataagccgcactataaacgtggggcagtgctttgatttgttgtgccaattgatcatttcgttcatccacttcaatgatcataatggctttttctcctttggactctcgggtaacagtcatcgtaccaatattgatttgtgcctcagaaagtagattcgtgacacgtgcgaccattccgggaacatcttgatgaacgatgacataggtaggggtacctaaagtcaatgagattttaaaaccattcaattcagaaatttgtatattcccaccgccgattgaaatgccggtaacggacattttgcggtcacctttttttaaaatcattttgaccatattcggatgttcggctttttcgtttttcggaacaaagagtacttctagaccttgctcataggctaactttaatgagtcagcaaggcgctgatcatcgggctccattcctaacaaaccgccgacaagtgcaatatctgttccgtggccgcgataagttttcgcgaaggactcatacaaaaggatatcgacactgtcaggctgttcgccaaagatgtggcgcacgattttgccaattcgagcagcacctgcggtatgggaactgctgggtccaaccataattggtccaataatatcaaagacacttcggtattttaaaggttccattctattcacctcatttaattgatgggagaaatccagatgtagtttagcataaaatatggagaaatagagcaatgagtggaactgtatgggatttttttaatcttttttttgttttaccgattttctccataaaaagcaaaaaaattcgctaagagttcttgcaaatttcttttgagatgctataatatctcagtgtgcattattcacacgttttttgtgtgcgcacatgattcactaaagtgggaggagaaatatggatctccaattaaccacatcacggactcaaggaggtatgtctcgtggcaaaaaaagtagaaaaaatcgttaaattgcaaattcctgcaggtaaagcaacaccagctccgccagtaggtcctgcactaggtcaagcgggtatcaatatcatgggattcacaaaagaattcaatgcacgtacagctgatcaagcaggcttgatcattccagtagtgatctctgtatacgaagaccgttcattcacattcgttacaaaaacaccaccagcagcagtattgttgaaaaaagcagcaaacgttgaaaaaggttcaggcgaaccaaacaaaaacaaagttgcaaaagtttcacgcgatcaagtaaaagaaatcgctgaattgaaaatggaagacctaaacgcagctgacgttgaagcagctatgcgcatggttgaaggaactgcacgaagcatggggatcactgtagaataatttttacagaccctaaggaagtagcttctcagtcggctctatattgaaaaatatgggacacgtgggaggttctaccgttataaccacatcaaggaggaaacaaaatggctaaaaaaagcaaaaaaatgcaagaagcattgaaaaaagttgacgctgcaaaagcttattcagttgaagaagcagtagctttggcaaaagaaacaaatattgcaaaattcgacgcaacggttgaagttgcttacaaactaaatgtcgatcctaaaaaagcggaccaacaaatccgtggtgcggtcgtactaccaaacggtactggtaaaacacaaacagtgttagtttttgcgaaaggtgaaaaagccaaagaagcagaagcagctggtgctgatttcgttggagacgatgacatggttcaaaaaatccaaggcggatggttcgattttgatgttgttgttgcaacaccagatatgatggcaactgtcggtaaacttggtcgtgttttaggtcctaaaggtttaatgccaaaccctaaaactggtacagttacaatggacgtaacaaaagctgttaacgaagtaaaagctggtaaagtgacttaccgtgttgacaaagctggtaacgttcatgtaccaatcggtaaagtttcatttgaagatgacaaattagttgaaaacttcaaaacaatccacgaaactttagtaaaagctaaaccatctgcagcgaaaggtcaatacatgaaaaacattactgtaacgacaactttcggacctggtatccatgtagatcaagcttctttctaatttgaataaaaaacaaaacttttgttgacttgactgccttatctatggtaaggtagtcaaggttaaaagtttaactgtaccgaagacagtaggtgacgtcagtcttaatttcctaccgaggacgtttattgagaaacttcaatagtccctctatgtctacggtggcatagagtttttttgtttttatctcttgataaagacaaatgaagacagaaatgttttcttgaaactcttccatcaaaatcaggaggtgaaatttaaaatgagtgaagcagctatcgctaaaaaagccgcaattgtggatgaagtgagtgaaaaattcaaagcagccgcatctgtagtagtcgttgactaccgtggattgactgttgacgaagtaactcgtctacgtaaacaattacgcgacgcaaacgttgaaatgaaagttatcaaaaattctatcctttcacgtgctgctgaacaagctggtctagaaggtcttggtgaagtattcactggcccaactgctgtagcgttcagtaacgaagacgttgtcgcacctgcaaaaatcatgaacgattttgctaaagaggctaaagcattagaaatcaaaggcggtatcatcgaaggcaaagtttcttctttggaagaaatcacagcattggcaaaattgccaaaccgcgaaggacttctttcaatgttgctatctgtgctacaagcacctatccgcaacgtggcttacgctgtcaaagcagtggccgaaaaagaagaagatgcagcataattgccgcataatcacactataaactaaactatctaattaaatggaggaaaacaaaatggcattgaacattgaaaacattgtcgaagagctaaaaggcgcgacaatcttagaattaaacgacttaattaaagctatcgaagaagaatttggcgtatctgctgctgctcctgtagctgtagctggtggagctggcgacgctggtgctgctgaagaacaaactgaattcactgtagaattgactgcagctggcgaccaaaaagttaaagttatcaaagcagttcgtgaagcaactggtttaggcttgaaagaagctaaagctgtagttgacggagctccttcagcagttaaagaaggcatctctaaagacgaagctgaagcattgaaagctgctttagaagaagttggcgcttcagtaacagttaaataatcatttttgatttttttgagctagaattccttttaagtaagggttctagctctttttttgtttatgattctaatttcagtttgagaaaatgacgctgtcttactattagtgatccgtatttttgttgaggcgtcgaggactttttataaaaaaacaagcctaagactagcgctgagcgccgctgacttaggcttgtttattttttgcgaaattgctgaacaagaaaaatgaagataaaaaagaataatgcttcccataaagtagttgtccaactaaaggtacgactgatcccaaaaaaaagattcccaatattggatacgaccaaatagatgaccgtagcaatcaatgaaaaaattaagcgttttgccatcataattcccccttgcctttgattgtaacaattgactgacgagagagcaattattttaagaaaaggctcctgtcaaaacgaaaaaaagatgcgccattctttaattgttttgggtgctttcaggcgtgagagcaaagaggggagctctataaatttttttgattttcccaatcagttcattgattaatcaagaggaacatcaaaaatccagccagctggagccttgcgctcaccaaattggatacccgtcaattcatcgtatagcgcacgagttttaggaccgacctccgtttcactgtaaaacacatggaaagactctccattttggattccgccaataggtgaaataaccgcagcggttccacaagcgcctgcttcaacaaagcgatccagttgatccacatacacatctccttcgacaggtgttaatcctaaagcatgttctgcaagataaaggagagaatatttggtgatactaggcaaaattgatggcgattttggtgtcacgaattcattttcggccgtgatcccaaagaagttagcggaccccacttcctcaatttttgtatgtgtttcagggtctaaataaatgcaatctgaaaaattccgttcatgggcttcgtatcctggtaataagctggcagcataatttccgcctacttttgcagcgccggtaccatttggtgctgcacggtcataatctgaaacaataaagttcgttggggccagctcgcctttgaaatatgatccgaccggcatgcaaaaaataataaacaagtattctggcgcaggtgcaacgccgatattctcgcctacaccaatcaatagcggccgtaaatatagagtagccccggtaccgtaaggcggtacaaattcttggtttgctttgaccacttgattgaccgcatcgaggaacatctcttcgggaacgaacggcatacgcaagcgacgagcgcttcgattcaatcgtttactattctcatctggacgaaacaagttgatcccgccatctggtcgtcgatacgccttcaagccttcaaagcattgttgaccgtaatgcaatgctggagaaccttcatgaatatgcagaatattatcttcagtcaatgctccttgttcccaagagccatttttccattttgcgacaaagcgccaaggggttttaatatacgaaaaccctaaattttcccaatcgatttgcatagagtcacttccttttttaatttttcctagtatagcatggaacgcccatcaagtcattattttctgaaaattcatcgcaatgattttcatttctaacatcatgatgaaagcttattactagagactttatattcacagaattttttttcaagcctatctggagctctgcagttgttgataaaaagggggaaggattttggcagaacgtcgagcactttagattgtatttacggaacagatatgcttcaataagggtagaaaaaaatcgattaggaggactttcggtgatcaaagaagcggtttctgaaatccaaggtgtcctggatgcttatcagcgactggcaccaatcatgatccatacacctgccgcaccaagcaatattcttagcgcagaaaaggcaggagaaatttatctgaaactagagaatctgcagcgtacaggatcctttaaggcgcgaggggcctacaacaaattagcaacattgacagaggaagagaaaaaaagaggggtaattgcttgttcagcaggtaatcatgcgcaaggtgttgcactagcaggcgccctgctagggatacatgtacggatctttatgccgcttcaagcagcgaagacaaaaatagaagcaacgagaaattatggcgctgaagtgatcttagcaggagagacattcgacgatacaaaacaaattactttggaagcgatgtcacgtagcggtgaggtctttgtctccccctttgatgatcgagcggtaatggaagggcaaggaacgattgggttagagattttacaagatttgcctaatgtggataatgtcatcgtaccgatcggtggaggcggcttgatcgcaggcattgcgttagcaatcaaacaattacgctcggaaactaatattattggtgttcaatcttatcaagtacatgggatgatttcctctatatggcgacaagaactgatagccaatcgcagcagtaagacattggcagatgggtgcgatgtggctttggctggagaattgacttatgaaacgttgcgctcgcgcatagatgaaaccgttttagttgaagagaaagatatcgaaactgccatccattatttggctttaaaagaaaaagtgattgctgaaggggcaggtgctctgagtacggctgctatcctaagcggacaaatcgatcatttgctgaaaggcaaacgaacagtcgcaatcgtttcaggcgggaatatcgatttctctgtttttaaagaaatcatttaaaaaaagatgatctcagaccaactagtcgtctgaagatcatcttttttagtccgttttcgatccagttttcagaggagaagaaacgtttactaaaaactgcgaccgccgccgccaaatgttccgccgccggaagaatgagtagtggtgccaccgccaaaaccgccgccgccattatttttaggtggacgtgggattcggcgagtcgttacgaaggagttgaccagacgatcttctttttgagtcaatttgatgctggatttttcttggtaagggtatttgtatccacccatttttaattggtatcttgatttgacaatgatgaaaaaagcaatactgatcactgcagctaccaataagctaatgccgatttctaaaggggtcagcactttataataagtgatcttgcctgtctcacgatccacatgatagtgaccgccgggaacccccgcttctacatagctggctgcattctccaagtagacccgggcggcttgatagtaattacccgccgtcatctgatcataaatattatccaacatatcatcaagacgagcgtcgttgatataatcgagcatatttcctgaggtggacacatgaagattacggttgcccatatcgatcatcaatgccgagccattctgatcatttccgatgcgatcggcgagaaaacggtcggtggtatattcaatatcgtcaattttgttatttgtcgttgcgataaaaacttcacctttgattttctcattcaactgatcggcttgttcgctcaaactctggatttcggagggagtaaaaagaccagcgttatcagtaacggtattttctgctgccacgccagtgaccgtcgtcagtagaaatccggcaaccattaggaaaaaacaggaaaattttctcataggaaatatcctccaatcatccctagaatcgcaatcacagcaaaaatcgctgcactcgtaaatcctaagcgtttgtaactgatgggcaagacaccgctgactttaccggtttggccattcatcgcataataaaaagcattcttattcggatcatctgcccgataagtgaccagccagactggtagtaggacgtaatgattggtttctttcgtgatctcaatgtcccgctgggtccgattgaagcttgtataaccattaacggtactgcttaggagattttcagcataaccggaaagttcctgttgtacttcattcttaagtgcttgatactcaatgtcgcgtttttctgcttgaaatcctgccagatactggctgcgaaagtcaacggccttatccaatgggaaaggctggaccccggtaaccattttttgttggacattcttggataaagcgtttttgatcagttcattgatacgcatttttccgcgtctggaaacagcaaattgtttgtgttctgtatattcgatctcgccgacacgccaaattcttaaagaagttccagttccagatagttggccatctagttcggcatcgatcctccagtaggggaaataaacaccggtcaatttttcaacttgcgcttgatcgaagaagtctcttggtacgaaccattttttttgtgcccattccagaaatttagcggttgcttcttctttttcgattgcaaaaggtaaaactttgttaggtaagaattctccagaaagacggccggaaaggacgactggattgtggcagaaataacagtaagtagctgctgtcgtagcatcagtgacgatctctgcgccgcagttaggacaaaggaacaagtccatttgggccgccttttcttcggttttttctgtgatagcttcttttagcgccggttccgtatcatcagtgatcggctgattttccggcgcagtcccatctgcaagttgggcttctttttgtttttgttcaaaggctgttacttctgcttctgtaaaaatactcaaacagaaggggcagtggaatttttgatcaccaggatcaaaggttagcgcaccgccgcagttggggcatttatgcgtaatgacatccatttaagttcctccttcatttagtctaaaggaactcccttaaatggcttgccgcagttgggacagaatttcgggattccatttgctaaatcaattatttcactacattctgaacatttcatttgtaaacttggggttcctgtaggttttgctgtaccgcaattgctgcagaacttacccgtattgcttgttccacactgagggcagtcccaactatcgccattgttttgtttctgctgattttcttggttttgctggatttgttgctgattgttttgagctgcttgattcaagtaaccgccagttgtgttcatccccatgcccataccaacaaatccggttgttgcaccggcagcattactacctgcggattccatcccacgtgcgatcgaaccttgaacatacccttcacgaacatttgggtcacccaacatggcaccttgattacgcatgttgatcagtttcactgaatcatccgtataagagatgcttgcaacagcgactgaaacgatttccattcctcgcagttcgcgccaactgtcgtctaaaacctcacccatgtatttgcttaattccatactttttgatggaacataggagatgcgctcgccatccgctgacattttgttgatggctgtctgtaaagcagtcagaaactctgctaaatattgttcgttaatgtcattgatgtcaacttgtgttttattttttggaatcgcgttggtgtagaataagatcggatcagtaattcgcaatgagtaatttccatgggctcttaggaataattctgcattataaaagttgtcaaaataatttaatggagaagaagtcccgaagcggattcctttgatttcttgcaaattgatatagaaaacttgttgtttttgaggtgttacgccaccaaatttgaagcgattaaacgtttcagagatggcatcctttaaggaaccgttgaacatggaaggagccaagtcatttttgacagtatagtagccttcctctgctgtataatcaatgatttttccaccatcgaccagcagcatcatcatattagggtagacgtggattacagatccatctgttatgacatcctccgttccttttcggttcgaaccgcgtttgtcattgcgccgtaccttcacacctttagtcatcactgtcgtgtcgcccatattgtcaggttcgaagacctctagccattggtcggcaagacctccgccaatcgtgcttgttgcagctttgataatacccattttcagtcctccttacaaattttcatcatccaatggatgaatgtacattcattataccatagctccgtattttctatgtattagaccaaagttgtagaagtgtaggcaaaagttgaataaaaaatcgtctataaaacaatacttttttcaaagtatcgttctctaggatgtgcggatttttattaaaagattgctcccttaaaaaatcatttctttttcagcagataggcaactcaaggtagttttttttgtaaatattacgtataatagataatagcgaattttgaaaagagtgaggaaaaatatggcctatcaagcattgtaccgtgtatggcgatcccaacggttcgaggatgtcgttggacaaaaagcaattacgcaaaccttgaaaaatgcgatcgagcaaaatcaaatttcgcatgcttatttatttaccggtcctcggggaacaggaaaaacgagtgctgccaaaatctttgcaaaagcaatcaattgtccaaaccaagtcaatggagagccctgcaatgaatgcgagatgtgccgttcgatcacagctggtacgcaagaagacgttatcgaaatcgacgcagccagcaacaatggggtcgaagagatccgctttatccgagaccgtgcaaattatgcaccaacacaagctgaatataaagtatatatcgtggatgaagttcatatgttgtcgaccggcgccttcaacgcgttactgaagacgttagaagaaccacgaaaaaatgtagtgtttattttggcgacgacagagccgcacaagattcctgcaacgatcatttctcgaacgcaacgatttgattttaagcgaatcaatacgcaagatatcgttgatcatctaaagacagttttagacggcagtcaaattgcctatgaagaagaagccttgcaagtgatcgcacgagccgcagaaggtgggatgcgggatgcgttaagtatcgctgaccaagctattgcctttagtgatggcaaagtcacgactcaagacgcattagaagtaaccggcagtttgtcttatgagatgatggaccgtttgatgcaattttgcgaagaccaagcagtaccagatgcattagagacattgcgccagctgctgtcttcgggcaaagaagcacggcggttgttggagaacttgctggtctattgtcgtgacttgctcttatatcagcaggcaccacaattattagaagaaaaatcactgcagatcacaccaggcttcaaaac

SEQ ID NO: 4 - DNA, 42883 bp, Enterococcus gallinarum
  Enterococcus gallinarum strain MRX518
taagcaccatcatctataatttcgttgaactcttcatcataatacttaaaatctttgtttgtaagttcaaaagaaacagtcacactatcccctgacttaacaaaaaccttcttgtaggctaccaagtcttttgttggtcttatataacgaccatattgagctccaatatatagttgaacaacctcataaccatctctacttcctttatttgaaacggtagtagtcaccttccaacagttcttacccttctctttaatgctaattggtgacatagaaaaagtggtataactcaacccatacccaaagggaaattgtggttcattggatacatctaagtatttggtcgtattaaacttttcacttgaatacggtctaccagtattgaaataattataataaatagggatttgtcctaaatgtctcggaattgttattgtaagctttccggctgggtttattttgccacaaaggacgtccaaaatagcattgccagcctctgctcctagatgccaagcctcaactaatcccttacagtacggtagaattttaccaactaccataggtctcccattcatcaacacaacaaccattcgtctattatactgatatactgcttttaaaaagttatcttgaatggcatctaattctatacttgctttagattttgcttcgccagattcaatagctttttcccctaagacaagtacgaccttttcgttttctgaaatagcttttatcgtatcttctgacaatattccatctcgtcggaacgcattgaaggcctcagacatcgcaacataattctcttgctcatttaatgcctcagccacacttacgatatcttcagctttaccattacaagcccatgtatccaacatagcttcctgatcagtgacgagtggacccataaaaagtactttttctgttttttttagtgggagaatatcagcgtcattttttaatagaacgatagattcttgagcgatctttcttgctagtttgcgatgctcattctttcttttttgaacttccttccaccgatcaacactagatctaaagggattatcgaacagtcctagccggtattttaactccaatactcttaagactgcttgatccaaggaatccgccgaaacagtctcagataaaatgagttcctttagataatcatgatacaaccgagaagacatatcgacatcgagctctgacgccatagctaatgtgactgcttgctgttcatctctacaatagccatgtataatagtttcttttaaagcattccaatctgagatcagtaaaccattaaaacccatcttatttctaagaatatcaatcaatagtcgtttgttcaccgttgagggaataccatttaaggcattaaaggcactcatcacactcaataccccttcatctatcaattttttaaaaggtggtaagtatacatttgagagtttatagtctgacatatcgaccgtattgtagtccctaccagcttctgattcagaataaccggcaaaatgctttccacaagcaatcaatctatctttgtcaagcaacccatttgtcatctctccttgaaaacctcttatttttgccgccccaaattctgcggtaagaaatgtatcctccccaaaagattcagctaccctgccccacctcggatctcgactcacatcaatcataggagcaaatgtccagtggatgccagcagccgatgcttctcgagcagcaacttcagcagttcgcgtcatcaagtccttattgaacgaacacgactcagctaagggaatagggaaaatagttgaaaaaccgtgcacaacgtcttcagcaaaaagtaaggggatttttagccgagtttcggtaatggctatcttttgtaaccgattagactgctggatatctttgattgataagaaagacccaacttctccattcattacgagttgctcatagtgttcctctttccctccataaattgacgtcccaacttggttaatctgtccaattttctcttccaaagtcatctttgccagcaaatcatttagtattttatttttattatccttcattgcacatactcctgtttttttgtaatatattactatccgattgattgaatcgctttttacgtccttatagtaacaacttttgttaacgtttactttactgatactaatattaaattgcaaaatagcatacttaccaatctgctagcaacttaggagttgaatcaatgaccttgtccttatcattaaaagatgcctacttttttagtcgtccggtccacaagtatgcgaaacaattgattgaaaaacgatttgtggattgtttcgagattgacatcattactgaaagtaacggggggatgtatattaatgaccactactaccccgttaaaaaaggggatacagtttttcgttatcccggtcaaacgactcaaggagttataccctactcctgttatgccattcgttttcaaactgatgactctctctttatcaaaacagccgaaaaggctgtccccggcgtatcgtcaggagaatctacccgacagatactaccaattattgaatctgtccttaatgaacgaatcgatcataatatgttgtcaaattatttctacgactatcagctgtctaaacttgtttacagtttactaatgctttttcatccaaattctaataaatatgaagacgaccaatcgaactacaacccttatgtgtcagagtgcatttcttttattcaactccattggaaaaatgtgacgatcaatgacctcgtcaatcgcactggcgtgagcaaaccatatttgatgaaactctttaaacaaacgactggaaaaacaattttaaattatattaatgatttgaaactagaacatatcaaaaagatgttgatattcactggtgataatctcaccgaaatcgcattaaactgtggtttcaatagttcaagctattttacaaactacttttcaaaacacaccggattatctccaaaagaatttcgtaatatctatcgaatctagtcgtgatttgactttaaaactctctttaaaataaactcggataacaaagaaccacacttcattttccagaagtgtggtttttgatatacaactattcaattaaaagactattcgactaagcagatattcagatctaatataactactcactcttctcctctgattctttttcttgcatcagctcgaagttcgtaaccttcatgatctttaagtcgtagtaattagaacgcttcccgaattcttcattcaatgtatcatagccaatttcttcggacagggtcggtttgtcagaaaagagattcgttcctaatcccattctttctccttctatgtcgatccccattgcagccaacgtcgttggataaagatccatagtcgtgtaagtcctattagccgttgcaacaggttctgtgtcggagtttaagatgacatctataatagaacgtttgtaatccggagccacgctattgaaataatcacgatccatactcaagtgatccctgacacgacaacaacagtatcttcataaaaaggttgttctttcatccatcttaaaaaatcgcctaactgttgatcggaaaatgatggataggctacaattaactagacagaaaaattaaggtgtgtagactagaagaaaacataccaggaggaatttttatgtctaagagaacacgaagaactttttcacaagaattcaagcaacaaatcgtcaatctttacttagctggaaagccacgtgtagaaatcattcgagaatatgaactaacggcttcagcatttgacaaatgggtaaagcaatctaaaacgagtagttcattcaaggaaaaagataatcttacgcctgaacaaaaagaattgttagaactacgtaaaagaaaccagcaattagaaatggaaaatgatattttaaagcaagcagcgctgatattcggacgaagagacaagtaatcgatgcgaataagcatctttaccctatatcagcgatgtgcagaataataggtctatcacgtcagtcctattattatcaatcaaaaccaaagaaagacgaatcagaacttgaagaagtagtcgctgaagaatttatccgcagccgaaaggcctacggctcaagaaaaataaaaaaagccttatcaaaacgaggcattcagatcagccgacgaaaaattagtacaatcatgaaaaatagaggattaaaatcgagctatactgttgcttattttaaagtacatcattctacttgcaatgaagccaaaacgacaaacgtattgaatcgtaaattcttaagagacaacccattagaagcgatcgtaacagacttgacttatgtacgagtcgggaaaaaatggaattatgtctgtttcattttggatctgttcaatcgagaaattctcggctattcttgtggagaacataaagatgccgttctagtaaaaaaagcatttagccgtatcaaacaacctctgacagaggttgagatttttcatactgatcgtggaaaagagtttgataaccaagctattaatgaattattaacaacttttgacatcaatcgatcattgagtcataaaggctgtccttttgataatgccgcagctgaatcaacttataagtcgttgaaagtagaatttgtctatcaatacacatttgaaaccttacaacaattggatttggagttatttgactatgtcaattggtggaaccaccttcggttgcacggtacacttggctacgagacaccggttggttaccgtaaccagagattggcgcagcgaatccttgataatgagctcggatgtgctaacgctagcgaggcagtctaactttaactgttagctcctgccgaagatcgtcacatccgaggaggctcattgtcaaggacaatcggaatagcatacggaaagaagttctgcaccttataaaatttgtcaaaaaaactgttgccattccatcaatttttaaaaccaaatatatatcctgatttcaatcactgacaacacatagattcttcttctctaacgaatctattataaattgagatagttcataatcgctagatattaatttatccactgtcaaatttgctggattagatactagtattataaatgtattttaaagaaaacaagtgtcttcttcacaactattacatctcctccatcctcaaaaatttataccaaaaaataagaaaacaaatgcaatataaaggaggattccccctcccaaaacaataaaaaagtagaaaacgtatttagtcgttttgctaatatcattcgcatttcttatcttaatactaataaaaatataaaaccctatgagtattaaaagtggtagcattttgatcaacaatttttatccttcctttgagaaaatcattttggaacttttttttttatgttaaccgatattataatttaaattttaatgattattcatacacattatatgcgtcaagtaaatcgctataattaaaaactaagagatatactgtaacaactatacgtaaaatagcaatacattttgaaaatggatcaacttcaacgttaaagacacttttaattatgttagataaattaatcgccacagtaactcacatggtttcttgaaaactaaaaatgcggccgcaatcctttagaaatttactatagatctactctgaaaaataaaataaattcactaaattgaattaaaacgtttctaaataacacaatttattacacttaaatctttttataaaggcctacataaagatttacaccatttttctgaaaaaaatactacctgtccaaataatactcatattccacctgtaaacattttaaaaacataagagaaagcctagtattctttactcagcttttatagatacatatatctataccttcaattccttcttccaacattcataagactcaacagttgcactttttttcattctcctacaaattccactaaacaatgcccacttataatcatcaagaatggcagtacctactccccctaatcctaagaaaaacagtaaaagtaaatataaaaataacatcatattcgtccataacgataaaagagtcaacaaaagagaaactaagcctactgtaacaaatgaaaagaacagaataccataataaatcttcaaaagaacagcccattctttgatcctattaagaacagataactcatcctccgtcatcaatcaatccacctgttctttcttctttttagggtcaatactctttaagaacttctcctccaacaccaataaatgacgatatacatcatccattgaccagcctgaagaaaggctaagacaatacaaaaaatcacaaggcaacgtctttactgtgcggtttcttgttacccagcttgctactgtactctgcttatatccatgcaactcacaaaattgctctactgtcatacctaaccgcgaaataataaatacattgatcgggtagggatatacaaaggtattgatactcatagtcagaaagacctcccacggtattattacgtttgcgataataatactactctttcttaagaccagcaagcaaggcggagaaaaaagaagtaacgtatcatagatataatgtaataggcaatttgcacctttttatttcaacctgtatcaatcatgaacagatctgtttgcacgccgatcttattgggttctatcaagcgtttcaatgctgtctggataaacgtgtattctcttccaaaagcttctgagatcgcagcgaaataagctccctggctttctttttttagccggataacagagcgcatcaatccatgtatcgaagctagcataatacctcctttacgaccagcacgaacacgaaaatgaattttgttctcttctctcaactgcttcagcactttgtccagggaacgttttgggatctttaaacgttcagttaactctttttttgtagaaataatgtatggttgttcttcataggattgctcattcaaataggacagtagatcttctgcccattcatgactatgtgaatacttgcgaacagctctttctttcttgaatttccaccaaccccgttttttgttgaatagctgctcttcagaaagattggcatcgacccactcttggcataataggacaattttttctctgtgcgctgcttgatattttccggagtaagcggaacgaatgattctggttaattctcgatcagataaagggttagccaagcggtcattgaattctaacatcgtcaattcacatgcttctacttcgtatcctgacgaaaagtatgccaaagacaaggtgaatatgacattatttcgaccatatacgcccttttcaccttgtattttttgactttttagcaacagctggaaccagggttcatctacttgacgaaattcttgagtagatggtaatacaaaaacgttcttgatctccgcttttttgtccgcatcttctctcattgaccagtcgatccattcttcgaaactataacgatactgtggttcaaagaataaaacattctcttcagaaggcattcttgtgatcccaaaatgattggcatttacatcgacaggaaaccgataatcatttgaaaatttgtttcttagattttttgagatccttttggccacattgatcactttaaaatttgatttcttcgtcacgtatgcaggcttgtctagtacatagaaagcttgaaatccatgcggtgtacgtagaatcattgtcggcataaagccgatctcgtgactggccaagataatttctccatagtcaaagtttggatccaatttgtcaaaatcaacaaagaatgtattgatttgacgcaaattgtcctcagaatgacctttcgtaaacattctggcttcatcagcatacgttccatagcgaaatacatttggtgtccaatgagtgaatcgattattgttttcgatcaccccttcttctgaagtgatcactagtccaatcccctcgatcatgtgttcctttgaacggtacgcaaaaatagccccctttcccgactgatcactaaaagagaccggttttaagtggctgtttttatatttaaatttacgaataccattttgtaataccgtcgaatatacgacatccaaagaagctgccatgactgttattccttcctaaacaaaaagagaacacaaataatctttcgatttgtgttccctcaatggcttagaacgtcagcatctcgttaaatcgcatgacaaaataagcatatatatattgagttgcccgtcaaaaaatggtaaaataaacctataagttcggattaccagtccgaatagatttaattaaatcacataagtggtaaccagccacttacataattctgagacgagcgagaacacatagttgtgtatgtgattcagatgaaagagtgaggccaaattcacttttttatccgtctctttttttttgatttattttcatattaagaatatatgaaaacgccatttaattcaagcgctattttctcaaaaatccattacatactaccttaaatatagttttcctattattatttactactctaattaaagattaacaactacatttgtagagataattattataatatgtactacttaaatcattaattatctactacgattttgtctcatattttatattatatactaccttaaaaattaattatctactaccttataacaataccattgataggtagtaattaatatattgttctttaggtagtaggtaataaaattaaaatacccttatctaacttatattatcctgaaatcatgactacatactaccttaatagaattggttactaccttttttaaaaaatttctaaaattacttactacctttaatgagagtattgtttactaccttattcctttgttatatactacttttattttaaatagatactacctaaaaagtatattatatactaccttattccattttaaaaattattacttactaccatatttagaagttatctactaccgttttatgcttttaattactacctaactaattgaatttcaattgcaacaattcgcttttatttaagtactaccttaatgaactaattttactcgatcataagctttataaactaaccaagtaaaactgacatcccttccaaattaagttttccctcttaagatatatttaatacaactagcgtcttaataacgtgtagtgactaatagagtagtcttgttttattatttattacagtagtatatagatattgtttttaaagtagtaactattttataatatcaaaaacatttatacatagaatttattttgggtagtatgtaatttaatttacatagcattatttatagtagtatgttactattattataaaggtagtagataataaaaggagtgagttagcttgtcaaagaaatttgtgataggaaatttcaaaggtggagtagggaagagtacgtgtgcacagatgttaggtttcgaagcagctgttgcaaaaaatcaaaaaactctgatcgtcgatctggatatgcaagggaatacctctgacgtaatgagcttaacccatatgaacttttctttagaagagggtggtggaggcggtaagcctcttgattatgaaaatacaataaccgatgtattgattggaaaagaacctattgatttaaatcttgaaacctatggggaagttgactggaataaggtagtagataaagatactcgtgtagatccaaaagatgctatatataaggtagtagataatttatatatattacccgcagatatgagctttgaactttatgatgattggatcaaagaccaattctcggattctgccgataaacttatctatatgcagaaacgtttaggaccgctgcttgaagaatttgacattgtatatctagacgttccaccttccatttcaatttatagcaaatctgcaatgtatctagcagattatgcgatcgttgttcttcaaacacaggttaagtccatgcgaaatgccatgcaatacttagaatatatggatttctttgttgaaggatttgatacttcattgaaggttgctggtgtgattccatttatgttagagagtggggacgcagtcgatcaggaaatgtatgcccaagcacaacaaatttatggtgatcatttgctcaaaaatgttgtactaaaaaatgcacgtttaaagcgatatgatggatctggaataacaatggagttaactaaggctgggaaattaaagcaatgggataggcgttgccaccatctatttattaatatctacgaagagctgcttgaacatgaggcttggtatgagtaggaggttctttaaatggctgatataaaagatttaggtatttttagaagcaacaaaggattagataaaattagggcagggaactcagctagaaaaagtagcaagaaacctcaaaccacgtctccatctaatgatataggtaccacaaagtcacaggaagatacaattaataataaagaagtgatccacgaatctccgactccttcttctgaagatactggacaaacggtcattcaaactaagaaaaaaaacagtctatctaagaaagtaaaaggggtaggggctcctataaggaaatttgatcgatctttctctgctcaaatgcctttgaaactttcgcctattttaaacgctacttcaagagtgatggttgaaaaatatgaaacaaatcttactagagacgagatactacgaaaagcactcgatgaatacatcaaacagcacttgacacaagaagacaaacaagacctttttaataatgttatgagggaagtagaaatgtttagggagaagaaacccactatcccagaaacagatgtagatggaaatataattcgtacagtcagtgaaatagaagaagaaactcaaatgattttacgaactaattggggaatgaattataaacattaaaaatctactaccataattagccattatggtagtagatttttagtttattatagataccataaaagtagtacgtaataaaatttcatataaaagtattcattctgataaattttcaggaatcatgggaaagatgacgaagaaattaaggtagtatataacctttatctactaccttaatcattgaactttcttcactatttgttaccattcacattcaccttctctttattatgtaatcatagttacaatctaatttatccaagtctaactaaaagatatatcaaacagtaaaatgattaatattactgtgcagggcaaaaaattaatagttattgagcgatatctattttttgtcaactcatataaaatcgcttcagatttactataaatttaaataatctttcctaatttacaattcagaaataagaaactaatatgatcatctggataggtgattatattagctttttaaaagaatagataaacatctggtgaggaagaggactacttatcagtatgatgaaaagctattagttaacataaatattttaaatacgttatatagcttgataattatctgttaaacgcctttaactttgtataatatatcttatgtaaactaaaataattatgtattcttaaaaataatgaacataattaagattgacctattgtgacacttgcgtgggatcacttactagtaatcaatctagtgcacgaacttttaatatgttaaaattagtagtcgcctatccgacagtcttgcgactggagggaggtgttttcatgattcaattcttcatttgcccccttcttgtcggcttactagtagccctcttcgagtattggctgaataatcgagacaagaagtaaagcaacgaaggcgacatcagcccacaaaatgaaaccccagagaatccgacctctctggggtttcgtggtgttttcatgtccaataattcatttgcatgtatattttaacatgtaatttcaaggaaatcaatgaagacaggtattggaaagagcgctgcctgaaacttcaataacgggcagcgcaactctaaatatacaaatttaagtatatcataataaaaaaatatgaaaaaatttgaaggtagtgaagattctaccgtcgtttgctttacttttattcttaataagttttgtaataattactcgacacggtagttcgttagctacgcagccactgatcgttgcatagtttctgacgttgttcttatgattcagtaactcttattccgtttgcctcctaatagttcatgggcgaagcgcgtccgtctaaaatagttgcttctatcgtttgaacctcattgacaatttttggagaatcttaccatcccttttcagcagttaaatgtaaaattctttaatagctacgcttatttttcatccagaatgataacctcccaaatttttccttctatctatatagcatcattttgtgtttcacgtaattgagctagttgagcaaaatcaattaaagattcaatcgacaatccagcatttcgcaagttttttgctagataaatccaatttaaatcattggtagtataatctcggtagccgctctcgtggcggtgaacgggtggtatcacgccaacacgctcataatagcttagtgtatccacacttaaatcaaacatttcagctgcttttttatattcatcgaatctcctcctcattcttcttatttataataaaccatggagttaactctagagaaaccagaagcctcttgtctctatgataatactacactaaatacctcctcacattccgtagactattaaaatattaagcaatagataaaatcagttaaatgcaacttctcatattctaatgtttattaagtaagaataatgttaaaataaaaaaacgaagagtattcggcgcagtccagaaaaacttccccaagttttctgtgccggtactcttcttagattaatgcatgttgcttaatcagcctacgctatatatttcttttttgcaagtaattacgatgtagaagcaatgcttaggaatcctttacgttttttctatttttacttttgacttcttttaagtgctatactggataagtaccatgaaagtaggtgttcaaatatgaatactaatttttatccagtggaagtttttagttcggactaccgtttatattcatcaaaagcaaaaacaagtttgtatgattttcaatcgagaccacctttgatcacgtcatttgctgtgctaaatttgaaagagttgcgcaatattcaactcaaattatttatttacgatattgatatcgaaaaattttctactttagaggaagctaaatctagatgtaactctcttatgtataaataatttaactagctgatcatagctagtttttttgtatatctgtatctaatgaactaaatgttcatccttaatctgcttaataaaaagaaatatttatcgctaaacttatggtggcggatttagaagtttatagattagcgaatgacacagaaatatctgccatctgctatgggtgaatcagataaaatatatttctggatggttcctttgaagagtttttctccttcacagcaactttttaaagaagtatacattttttcagaaccatccagataataaacattgattccctgaatctgattataattaatcggagaacgtcgtgtacaagaaagttgatctcctagatatttcacttgattaacaatcattgggtcattaagccaatttttgttaagtgtcaattttacgattaactgatgaatagcttctttttgcattttattcctccactcaaaccaatcgtctatccagttttacatatacatagtacgtgatcaaaaaactcaatctattcttcattgatctcagttactcattaaatttttataatttataactgttctttccgtagtattcgtcacttctgaatttgaaagggttacaactgccgaattgctgagtagctttataattgttccagctgtttgtttttttctatatctaaatatgacctgttgatctatatgaaaagattggccttctattgaaagttgttgtggtttccattgtgaaaaactcattcttacccctcctttgaagtatgaaaaaaccgcctcacacatgttgagacgggttaaaaggaacttttatgctttatagatattagcagcttgcaaaccgcgttgaccttcttcagtatcaaaagtaactgcttgaccttcatctaaagatttaaatccatccgcttgaatcgctgaaaaatgagcaaagacatcttgaccatcttctcctgtaatgaacccaaaacctttatctgaattaaaccattttactgtacctttattcatactgtttcctccttgtgcatctcttcgtatgcgttttgttgcaataaatgtttgattggcaaaaggagagtataaatttaagcatagcactcttaatacgtttcaaaatatatcactacaagtagtataccacataattatataggaatgtagttttttggaaataaggtatttttttaaaataaaacttaatgatacgaattttatgcctcaatcgcctagtaatattcatatatttcagctgcttgatataatatgtcattattttccattgttttttccttacaaaaaaagagatttctttacgaaatctctaaaagttaaattatgagtgttttaattgctggtttgaggtgtacacacacaaccctattaaagctcaaaccaccagtacattccaacgcaccgaagactatcacagctatagtagatacttaagttacctacactattgtattctcatatttgtactattttgtcaaacatttctcgtgaatctacactaattattagctttaaaaaggaatagctatttcactcagacgaatcatcggtcgaccagttccttgaaggctgaatcatgttcagttagagcttgattagcgaacatctcaatttcataaactaaattactatcctcttttatatcgactttgagtttttttccttcacgataatatgcttttgcgaattccatatctttttctttatttcactcaagtctttaatcagcacaagtggcccatcatctatacgttcttttgtgttttccatgataaattaaaggattcctcaattaatttacttgatactttatatatcttattattccgcctaaaaatcattcattgactgttttactttttctagagttattattgcccgctacttttcaaattctttgctaataattaataccaaagatacagtattcatacataaacgataacatctccaattcatcaataacttgactactattatagtacctggataaaagcttattaaacttttcgaaaacagattcaggtatcgacagtaatccaataccgtttctaaacatgatcttattagcagttaacagtgcagttctcttattaccgtccccaaataattgatttttcgaaatgaatagaaacagtcgcaatgctttttctgtctctgacatatcttgattcattatctcgtcatattggttctttacctcgtcttcagttaactttggtggaacgtatcttccttgaatagtcgatccttctcccccaccggttcgtatttcaccgggaaaaagcgcatcctcagctgcaacgatccgattaatccgcttacttgtctctagcaagggctcctgtacgtcgtttaaaagcatttcaaagcctctttttaaggtaacgacgctcaggacatcatctacagccacattattggcccgattatacttaataatctcttctgtttgtaatagtgttgtattcaatcctgcaaattttcccgcattatacaccagttccacaatgtttttcttcaataaatacacagactctttgcgagataagtggtatttatcaggaaatttcggacgcttttcttcgttcattttctcacctattgagtttttccttctattatatagggcattattctgtcatagatccaagctctttactgcggtatccttatcttcctgggtgatcccaatatagcgtaaggtctcccgttgcgaagaatggttgagcagcgactgaatgatctctgttttggtcccttgtttgtacaaaaaatagccgaaggtcttgcgcatcgaatggggaccaatttctttcaaaccaaccgccgttcctgcttcatgaatgatccgccaaaggctttgtcgagtcaaaggcgtatctgctccttttcgacttggaaacaaatacttgctgaagtcttgtgctcgcagctgctcaggaaattctgactgaacataatcgagaatcacttttcgtaatttattcgaaatgaagactgaattgtgtttggccgttttttgttccttcatggccagacgttctttgacgatcacacgtccacgggaaatttctaacacatcacttaattttaactgtcttaaatcggagattcgatacgctgtattgattccgatcgaaaaaagcaccaaattccgttgcccatatttgccggaagccaaaatggccttcatggcatcgatcttttttttgtcacgaatcggttccacgctcttcatttttagacccctctcaaatgttacttaatatgattataacagataataagtcacatttaaacaagctatagaaaaaagacgctaaaagaaaagtgattttctcttagagcctctaaggatggagcgattttaacgaatgtgacacaatacgattgtgtcacattggtcttttgagattttcggtaagatttgattatctcagaacattaatattgcccctttaaaaaattttgtcagtacttttaagttattctattctgaaaattcaaaattttcagtctatataattaacttatattcagttttaccaaatgataagctttaaaaagtattcagaatttagtcatgttataaatccaataaagtagatatggaatatttattttctcttgtctaatttataagaactaaatgatttcatcattgttttgacacttttagttgggagcgtcaataattttgtgtaaatggttcttccctactgtagattgtttctaattctccatcggttgactcagcatttgttcgagctcgccttcggcctgttggaaacctttatgactgcgacctaggaatttttggttgtgagtatcaaaagacgagactaagaaacgttccatcgactcttcattttggaactgttccttgcggtggctgtatttcttgatttgcttattaaagaattcaatcaagttcgtagagtaaatagtcttgcgtatggctaatgagaaaccatagaaagtgagcaggtaatcgttcgaaaggatcgattccactatttttggatagctggttttccatttttccgcaaaagcaccacgttcttccaatgccgcctttttagatgaggcttgatacaccattttaaaatcatcacagacttccttacgatcatcgacacgcactttgtgactgatattacgggaaacgtgcacacagcaatgttgaaaacgggctttggggtagaaccgctgcacggcccctgccatcccctttaagccatccgtgatgaaaaggaggacgtttttcacgccacgttcctggaggtctattaaaatctcttcccaaatcgtgatagattcagttggtgcaatcgcatagctcaacacttcctttgaaccgtccgggcgaatgccaactgcgatacgaatggcttccttggcgacggttttccgctttaaagggatataggttgcgtccatataaatagcggcataacggtcatgaagctcacgttccttaaatgaagtgacttcttccgtaaatgatttagtcatattggacatggtttggggcgtgtagtgatgcccatacattttctcaatcaagtctgcgatttccgacatggtaataccttttcggaagaggtgaatgacggtctcctctaaggtatcattcgtccgtctataagcaggaacagtctgttgcttgaactcgccgttgcggtcgcgcggaatctgaagatgaagttccccgtactcggtcttgactgtacggtcataggagccgttacgagaattacccgtgttaaaaccaatgcgatggtacttttcgtaatcgaggaaagccgttaactccgttttgagaagcgtattgacagctttttccaaatggacacggaataattcattcaaatcgcctttgttcgctagagtctttagaatttctgtagtaaaatcgttcatatggaagtcctcttttctgtgaatgtgttgtggtaactctattctacagaagggacttccttttttctatttacacaaaatattttacactctcgaaaatttctctcccattttaatataaacaagcatctttaatatattttaattacttattgttatagtattatacattttgtaaattttattttaaagctttaatgttatgatagaaaaggatagcttcaatctccactagatacttcagcgcattcactatttttgctacattctattctttgatagcttgtcttattatcctcaatttatacaaataatctctcgcaatgagtactgtattcctattaaaatatcataatttaaatctagtttttcaatgaacagcattctgtttctaatttaattacatcatgcatttgaataaattggtgatttcttgtgtataacttttgtttctcatttacgcctattaatcatgtagtagattttcattaagtagatggtattgtctcaaaaaaagataaattgaggtaaataagaacattaagccagaacatattatcaatacagcaattactttcccctgatatgttactatatagtccccatttgcactaattaatgttctaagaggtaatgatgtaaacgttacagttaaaggaatcaagattaataaactgcaaaataatctaaaaaataaagatacttttgatttcgtcaatcccattgttcccccaacaaagggtactattagtataaatatgggaattccaaaggtaaaaatacttagagtaattattgttccccattcccataggaataatcctgctatcatgaataaataactgaataacatgattaaatgagtaccttttctaaattgatttaatatatgtattctcttcctttcaccttaaagtgttaatgagtgacttacctaaattttttcttaggctgcctagaattggctaggctagacagaaaaattaaggtattaaaaataataaaaaaatactcgagtattttttagtgaaaagacctcaccgaagaacctatgtaaaataattcaaacaataagtaatcaatctctcccttacaggtaaatcacataccgaaatcattcaatattacgagcttcatagcttctgattctgatagaagagataggtctcctaaggacgcttacataaaacatgggaggaattaatgaaagaaattggatttgcaaattttataatcaagttagccacctagaaaataaaaaaacatcatagtgaaaaatcgtgtattattgaggttcctacaccgatcaataaggagattttcactatgactaacacttattctacaacagaacgtgccaaaggaaaacatctaactgctattgaacgcagaaaaatcgctggttaggctgctgaaaagctgtcgaatcgagaaattgctcgaagaatcggtgttcatcatacaaccattgccaatgaacttgctcgtggtaaagtcgaacagacacgaaaaatcaatggtaccaaacatagctatttcaagtatgatccagagtatgctcaaatctgctatgaacaaaagcgaaaaaagtgtcactgcccctctaaatttcattaagtaaagtcttttctagcttactttgtccaacagtttcaaacagctaactattcacccgatgtagcagtcggtgtcgcaatctttcagccatcggagatggtgtgtacaacgactctctacaaatacatcgacgaacagcgattagaaatcagaaatattgatcttttgtataaactaagtcggaaaacacataagaaatgccctcgtacaaacaaaaaagttttaggtccaagcattgagcaacggcctgagcacattgattctcgtgaagaatttggacactttgaaatcgacacggttgttggtaaacgttccggttcagaaacggccttgcttacccttacagaacgtcaaactcatttttagattattcgtatgattgatgggaaagattctgattcggttgcctatgcgatggaacaattaatccaacaatttggggcagagagttttaaaaaggtatttaaatccatcacttcagacaatggatcagaattttctactctgaaagatacactgggaggctatactgaagttttctttactcacccctatacatcatgtgaaagaggaacgaatgagaatcataaacgcatgattcgccgtgagatacctaaaggtgaaagcttagaaatatatgggcgcaaagatattcagaaaatcgaagatggcatgaatgaactatcaagaagaattcttggttaccagtccccaaggcagtgatttgaacaagaataccagatagcgttgagttgatttgacagtgagcctcctgtcgtatggcttcacgtctgggaagtctggcatatgctagctcactatcaaatcaacaacgtagtcttaaataacacacaatattcacttttttcaataggtggctaatttgttcttgcaattttggatatcaattaaagtgttgccacagaaaaaaatatatttttactcgtgtttacaaaaacaaaaatattgcccaaatttcaagtcaaacgctctatttcagcttgtaatagttgaaaatagagcgtttgatttatattttgacgttatccattcaaatgaactacttcagaaaaattgttaattgagtaattaattgggtagagataaaatagcttttgccttctacttaccagctaatttattttatctcaaatatttgtttgttctctttataacctttcaccattacttttaatcacctgtttgtaccaatcaaaagattgctttttcattctttttagacttccctttccttgattatctttatccacatagatcatgccatatcttttttccatttctcctgtgccagcagaaactaagtcgataatcccccaaggcgtatagccaattagatttgccccatctaaatagatagcatctctcatattctcaatatgttttttcaaataactaattcgatacacatcattaattgtagaaccagttattttatcaactgcacctaacccattttcgacaataaaaaggggcatttcatacctttcattaagccagttaattgcatatcttaatccaagaggatcaatatgccagccccaatccgacttttctaaataaggattttgcacaagatcttttgattcattgtaatcaaagtacggttcttttccactccccttcactgtaaatgacatataataactaagcccaatataatcgacaattccatcacctataatcttttcatcctcttttgttctatctatagaatagccttttcgctcaatataggtgttgatatagcttgggtaagatcctctacattgaacatctgcgaaccaataacggcgctgcatagcagtgttggcggccaaaatatctttaggattacacgaataaggatagattggtgccatcgcaatcatacacccgatttgaaatttcgagttaattttgtgtccgatattgactgcaagagcacttgccacaagctcatagtgagccgcttgatacatgactttctcccgatcctcatccgctgtataaactaaccccgaatttgtaaatggtgggaaatcctcatcaaaattcgcttgattattaatttcattaaaggtcatccaatacgtcactttatctttgtatcgttcaaaacacgtagttgcaaatcgaacaaaaaaatcaattaattttctattcctccagcctccatatttttccactaaataatatggcatttcaaaatgcgataaggtaataattggctcaatattgtattttaaacattcgtcaaacaagtcatcataatagtttaagcctgcttcattcggtttttcttcatctccatttggataaattcttgtccatgcgatagaggtacgaaagcattttaaacctagttccgcaagaagtttaatatcttctttgtaatgatgataaaaatcaattgcttcatgattcggataattttcgccttctattacgccctttgtaatgcgcctaggcaaggtaactgatccagaagtcatgacatctgcaatacttatccctttaccatcctctttccatgctccttctaattgatgtgccgctaccgcaccgccccaaagaaatgtttcgctaaaaattgccatcttattcacctaaaacctctctcttttacaaaattcagtgttcgcatgtatataaaatttcaaatattcgatctcttaattccggctctaatttattgataatcgctagctcagctaacagattagtcgcttcttttaattcacacaatatatcatttttagagtcatagtccatttctgctagtctaagacattcaacaatgcgggctattttatcgtttgcctgaatttcttctgctttaattttgacagactgagaagtattcgataaaaacaatgggtcaatagccaatctatgaataattatctgatgtactctcgatgctggcacgatttctttatctcctgttacggcgatagtgactgtttttgttgcccagctaaaggagatgctggtaatacaccttttatctccttcgtcctcgattagctcaaactcatttgaatctcctgggaatatatgccaatctatctgcttgggtaattctgtacctgttagtgctggggttggatcaaggggaatgatacttccagcttttgcaaaaacaggcattgtgtctaacggtctaaaaattcctatttttgtatcgcctgaatattgaacatccgtaaaaaaatcaaaccattccccttctggaaaccaaacctctactttggctgtcttatatttatgatttgttttggacgtaatcggcataaccattaactctgtcccaaaaaagtattggttgggaacatgatagctttcttctttcattggataatgataatacattggtgtaatcaacggatagctttcttcatgagttttaacattcattgtatacagatatggcaacatttgatgacgtaacgttaaaaattttttcatgatttgacatacagtctttgagaaagaccatggttccttattattaaaaatgctaggcgagctgtgtaggcgattaattggactgaatacaccaaactgaatccaacgtgtagctaattcttcatcatgatacccttgtctatgcccccctatatcatgactccaccatgtataaccaatattggaagccgtgctagtaaaataaggttgaaaagccaatgatttccatgaaattactgtatctcctgagaaacccactggaaatctatgacttcctggtccagcaaaacgtgacagaataatgttatttttcccagacctgtttatatctttataatgataatgatttagtagccaaagagaatcaaagtcagtcatctcaccctcaatatcctgctgccaatcaatccaccaaaaatcaacaccttgcttttctaatggatgatgtacatcttcaaaataggtttctctaaaggctttatttgacaaatcaaatatggctggttgctctttttcctgatttaaccccagtcgcttacttactgtcggatagcagtcttcaaatgcttggataccgttggctggatgcaggttcagtgttactttcagcttctttttgtgtaacttttctaaaaatgcttcaggatttggaaatagttctttattccaagtatatcctgtccagccacttccaaatctttcaggaacatctgtaatatgccaatccatatcaatcacactcactgacaaaggaacctcttgttcttgaaaggtgtccattaactccaaataagtttcttctgaatacttccaataacgactccaccaatttcccaaagcatatcttggcaataagggtggctgtccagttagatgaaaataagccttcaatgctttaaaatatttccgtccaaaaccgaagtaataaaaatcgaatccttccccttcccgaagtatcgggttatcctcttcatctaacgcaaagctgcttgaatcatctagaatagcaaaaccatttttactaataattccttcagataattctatcgctccatccgttctatccagtgttttaacagttccttttaatgtgttaaatttttcgccaaaataccaacgatttcgatactgggacaaattattcctagattcaataaataaattttttgcagaaaattttccttttttaaaataaacatgaattgcatcagtcagtatctctaatatttcatcattttcaatcacttcaaattttggcggactaaattctctattttgaacgatttttgtccgtctatcctcaaagtggccttcagatgaatattctaatctgattaattcattcgttaaaattgtgattcggtaggtatctccttgaaatacattattcataatgacctcctaaaaaaaatatgatacaatgtgagataatagtaaaaaataggtggtgaacataacatgaaagagtttagacaagcacattcccatggtgattacttgtttccttttgaagtattcaatcaggcttatacgatggccaacatacaaactgtgtatatgcattggcatcaagaaattgaatggattttctgtgaagaaggttctatttctgtctttgttaacggaaaaaaatacattgtggaaaaaggacagatgcttacaattccagaaaaagccatccattatataattacaaatagtgaatgtcattactacacatgtgtatttcaaaaaaaattactcaaaatggacgtattagatggcattacctatcaatacatttgtccttatattaatgaagagctagaaattgaggcagtaatacctgattcgactcatgttatagaaagcttatttaaaaaaatttatactgtcgaacataacagaggcctaacgtatcaattaaaaataagattgcttttactagagctgttttcttaccttattgaaaatcaacatctaaagaaaaatgacaatttcttaaataccgatgtccaaattcaaaaaatttatgcgtatatcgaacaaaattacaaaaaaaaaattacaaatcaacagttatctgctttggtaaattataatcctgaatatttttcaagatattttaaaaaacagtctggttacagtccaacagatttcattaactactatagaatcgaacgtgcttgtgacctcttattccatacaaaactatcaatacttgaaataggaattgaatgtggctttgaaaactgcagctatttcattaaaaaatttaaaagcattaaaggacaatcaccaaaaaaataccgtaaattaatcttagacaatcaccttttaatgtctaagtggtgatgatgaattttcactatatttgttcccctttttcttgttttagtgctaataagtcggcacgtctaacaaaaggaaaccatatgaaataaggaagaacaatattcgtaacaatacttagtaataaaaccctccaaccaccttgtagaaagtcattaaagccaaatggcaaaccaaatataacagaaaatccatttaattttggtaccaatcctgttgatatcgctaagtatgcgacaatatacattaacggagcgctaaataaaaagggcacaatgaaattaaagttaagcatcaatggtatcccaaaattcaaaggttccccaattccaaatatggctggtccaattccaagttttccaaactctctaaactgttttgattttgagcgtaataaatgaaggcaaagagcaatttgatagccgccaaaataaaagatagaaaaaaatgctaatcctgtaatattgggaagtggattcccagctgcagcagcttgcatattttgtgtatctaatgctaataaaattggcatataaaaaggacttaatacattttgcccatgaattccaaaaaaccataaaacctgtgctaagaaagcaaagagcattaaagaaaataaatttcctcctactgactgtaacggtgcttgaatagctgtatagattagttgatgcagacttccagcttgagtaaacgtacaaatataagaaatactactaaaaataatcgctgatattacaaagggaataatacttgcaaaagtattagacaccgcagaagggacgctttctggcatcttaattgtcaaatttttaagcttacatgttttgtaaatatatgccgaagaaatcgcaactagtattgcagtaaatgctccttgagaacctaaccatgttaaaggaatcgctgttacttcacttttttggatgatgtctgaaggcgttaaaatcaaaaatcccactagagaaattacacctgctgtcgctccatcatcattttttaaataacggctagcaatatttttaccaataaaaaaagccatatagatagaaagcagccctaccgtataattaaaggcacttaaaaagatcgttgttaacccaacttcttcaaaaaacttagaaaccgagcctagaggaataaccgctaaaattaacgaaaaagaaccaataatcgtaatcggtaaggtagacatcatcccactagataagccttgcaataaattgttattgctaattttcccagcaaaatcggaaaaacgatcaaacatactggtaacttctttttttatcttttccataaaaaatcccatccttctcataatataattttaccctcgtgcacttaattcaaatcagatatctattattaatgtaaacctttttatttatttattctttactatttttgacagaataatataactattttgacattcatagacaattttcttatttcaagtttatataacatgagtagatagtaagcgtcctataggacgcttacggtcaatcacaagagtcacaggttacttcaaaaaaaaagacaacttgactccataacaagtagaactgataacactagcaagaaaaaaagcagtttgtaatagagaacgatattttaaatgcaagcagcgctgaaattcggatgaaaaaataagtaatcaatgccactaaacataaatactccatacatcaatatgtagaaattttagaagactatcactaaacctattactatcaattacgtccaattgaaaatgaagatgagttagaagcgatcataaaagagtaatttatccataatcaaaatacctacggtatccgaaaactgaaagaatgttagccaatcttagctataattatttgacgaaaaatcggttggaccatgaaacaacaaggattgaaatctatctatactatcgctcattttaaagtttaccgaaaaactgataacgaaagagagaaagcgaatatattggattgagcctttacactagagaatcacttagtgtttttttcagctgaaaatgtctccacaaaatcagttgaaaaataccccacttcatttatcttaaccactgctttgtatcttctactcgaaaagaagaaccacttagatcaagtacgtgcgcccgatgggcgattcgatcgacaattgcagcaataagcatggggactttgaatgtttcttcccatcgttcaaactccaagttggatgtaatgatcatggaaccattggtatttctattagaaagcagattaaagaggatttcactacctacctgatcaaatgacacatagccaagttcgtctaatataaccaagtcatatttactaaaacggcgcttatagtaagtcagctggtttgcactcattgcttcttttagttcaatcacgagattaggaatgcttataaataagacactttttcctgctagacaagcctccattcctaatgtattggctaagtaagttttcccgacacctggatttccaatcaatattaaaatctctttttgctcgataaatcgaagttccttcagttctgtaatcttttttcgaagttttggatccaggtgtgcagttagatagtgatcaaaagttactcggttgggcagttttgatccagtaatcagtcgttggatccggttgcttttgcgattctcaaactcagcttgtaacagcatttctagaaatcccacataagattcagaaagatccaatgcttcttggatcgcttgtgtataattttttcgaatatgggacaatttcaaatgttttgttagtgtatcaatactcataacgactctctccctagataaagtttcgtataggcctgtacttgaattcttgcggcatttacagcttttgttttcggccgctcgcttagtctttcttgacgttcttcaagtgcatcggactctagatgctgcaccagttcttccaacgggactgcctggtagaaggttaaacgttcgataaatcgcttgggatcattttgatgatattggagaaaacaacgatgtaatctcggaatcccctgaagagccagtgaatgtttgagagccttcggcttacgagaaaatgtatgcaagtaatgttggatttgaatggcataattcttactttctttttcaagtagatgccgacaaagggagcgtcaataattttgtgtaaatggttcttccctactgtagattgtttctaattctccatcggttgactcagcatttgttcgagctcgccttcggcctgttggaaacctttatgactgcgacctaggaatttttggttgtgagtatcaaaagacgagactaagaaacgttccatcgactcttcattttggaactgttccttgcggtggctgtatttcttgatttgcttattaaagaattcaatcaagttcgtagagtaaatagtcttgcgtatggctaatgagaaaccatagaaagtgagcaggtaatcgttcgaaaggatcgattccactatttttggatagctggttttccatttttccgcaaaagcaccacgttcttccaatgccgcctttttagatgaggcttgatacaccattttaaaatcatcacagacttccttacgatcatcgacacgcactttgtgactgatattacgggaaacgtgcacacagcaatgttgaaaacgggctttggggtagaaccgctgcacggcccctgccatcccctttaagccatccgtgatgaaaaggaggacgtttttcacgccacgttcctggaggtctattaaaatctcttcccaaatcgtgatagattcagttggtgcaatcgcatagctcaacacttcctttgaaccgtccgggcgaatgccaactgcgatacgaatggcttccttggcgacggttttccgctttaaagggatataggttgcgtccatataaatagcggcataacggtcatgaagctcacgttccttaaatgaagtgacttcttccgtaaatgatttagtcatattggacatggtttggggcgtgtagtgatgcccatacattttctcaatcaagtctgcgatttccgacatggtaataccttttcggaagaggtgaatgacggtctcctctaaggtatcattcgtccgtctataagcaggaacagtctgttgcttgaactcgccgttgcggtcgcgcggaatctgaagatgaagttccccgtactcggtcttgactgtacggtcataggagccgttacgagaattacccgtgttaaaaccaatgcgatcgtacttttcgtaatcgaggaaagccgttaactccgttttgagaagcgtattgacagctttttccaaatggacacggaataattcattcaaatcgcctttgttcgctagagtctttagaatttctgtagtaaaatcgttcatatggaagtcctcttttctgtgaatgtgttgtggtaactctattctacacaagggacttccttttttctatttacacaaaatattttacactctcaaaataaaataagggagtaactttctctaaccaaaagttactcccttattttattttgttatcactgttgaatcatcatttataagtgaacgtaaaagataatagatacccaaaaacagaaagaaaaataacggtaatacacggagtaaaacaaacggagtttcaaaaatgaacgctttccaaaaccacataccctccatttcccataaaccttgggtaaaataccatgatttaaagggttctgttgcaaagttttccaaaaaatctattttagtgtaaaattgagaaaaaagacagagaggacagagtaatgaatcattttaaaggcaaacaattcaaaaaagacgtcattattgtcgctgttggttactacctgcgttacaatctaagctatcgtgaagttcaggaattgttatatgatcgtggaataaatgtttgtcatactacgatttatcgttgggtgcaagagtacagcaaagtcctctattatctttggaagaagaaaaatagacaatccttctattcatggaaaatggacgaaacctatatcaaaattaagggacgttggcattatctttatcgtgcaattgatgcggacggcttaaccttagatatctggttacgaaagaaacgggatacgcaagcagcctatgctttcttaaaacgactccataaacagtttggtgagccgaaagcaattgtgaccgataaagcaccttctcttggctccgcctttagaaagttacagagtgtgggtttatatactaagacagagcaccgaactgtgaagtatcttaacaatttaatagaacaagaccatcgacctattaaacgacgaaataaattttatcaaagtctccgtacagcctcttccacgattaagggcatggagaccattcgaggaatatataaaaagaaccgaagaaatggaacgctcttcggcttttcggtgtctactgaaatcaaggtattaatgggaataacagcctaagatatttggagttcagagagggcgcgtttgattttcaaacttcgcaacagaaccaattcaagttacgggcatacttccaacggtttcccttaaaagccagaaaacgtgtgacacacatcgtgatggatatgaatgcctcttacgatgcagtgacgaaagaagtctttccaaatgcgcgactctctatcgatcgcttccacatcatccaacaaatgacgcgtgcatttaatacccaacgaattcagacaatgaagcagctaaagaaaagtgatccacaagcgcaaaaaaattaccgaaagctgaaaaaatattggcgaacaatcctaaagaaaaatacaaaactaaactacacctcttttaagcaatttcccctcttccaagggaaatacatgacggagtcggaggtgcttgattacctactctctatagataaccaactacgacaaagctatgaagtctatcaagagttattagctgcttttgatgcaaaagattttactgaatttttcaatctcattgaatcattgccacattccttgaatgatgggtttaaaaaggcaatttgttatctgaaaaagcacacagaagcaatcacaaactccttaaaatatccctattcaaacggaaaattggagggaaagaataacctcatcaaagtaatcaaaagaattgcttttggatttcggacttttcgtcatctccggatgcgtgtcctgattcaacagaacatctgtgaaatcatttaataacgcaaaaaaggaaatgccgaagcatttcctaacatacgatttgagcaaaacaatagcaattgacaaagaacctaaataatttccataaaaaacgcactcctttccaataattttaggaaaggagtgctttatttcatataaaatcaattttttatacacatgctcattggctatatttcagggttctcgagaaataaagcaagccagtttgacaatcgacataacgttcttttccaaattgctggcggctttttttcctttccaccattagtatactacagtttctgcctttcatccttcagggtgaatgagcttgcgaattcatgtatgtttgacaaagaacctctttttctaaaaatagaccgacaaagtactgcctagaatcaacccattttttaaaataacgtacgatttttatttagtggcacgttatgagagtctctcgttcgtttttctgatctttttattgactcaactgcctataaaacgacggaaaaagtatttcatgaataattcaggtacttataatcagtacaataacctgataaaacccctagtttaactagggaatccgaagctaagccctcttttccaaacccagagagaagaattaaccctgcgaaagcaattaatttcattagttcttctgaatgattcaattgacttcacttactcagtatattaattggattcatctcaatcattttattaaaagttggttcactcattacttttaatagttcttctttcaaacttgttaaaatataggtaagcccaggcgttcctccataagttggcaaatatttttttcgtcccatatcacctgaaagacaaatctgattttcataacccgcatcaaccagtcgtttaattaattggacgcggtctgcatcatgattcgccaactctcggccaatatgatctatacaaatacttgctcccgtttcacagatttgagctaaatagtgaaaatctttagttaaatctacatgactcaaacaaatattacttgctttcgcaccgttttttgttaaacaattaatttgctccagtcccatcgtccccccatcacaatgcgtaataatgggaatccctgtttttttttgtacttgaccggctatggctagtattcgttgttcagccaatgtaacctcatttttactcgtacctactttcattgctcctggcaaaaggttttgtgaagtgactccgtgagttatttcggaataaagcaactcaaagatctcatcatcattgagcgttgtcaaccattttggctgaaactcttccttatggaatcccgtaacaaatgctacattcactccggtagcttcagatatcattttcaaagctaacggatttcgtccataattaattggtgtcaaatcaacgatagtttttccaccagcttgtttaaaagccataacttccgcaatactatgataaatatcatccaaggtataatcttcatactttcttaactcattaggaatgacatataaatgttcatgaataaatgttgtacccaaagactcagcttcgattgggcctgtaaccgtattgatcatgcactcatctcctaccattcagcgattgtaccatcataatttttccacttaggattggtccaaactaaaccttcttgtgcaatttctttcactcgatcttcgtccatttctaaccctaaacctggttttgtcggaagatctacgaagccatctttgtattggaatatctctttattctttacaaaatctaacaaatcaaaccctttgttgtaatgaatacctaagctttgttcttgaataaacacattaggtgtacaagaatcaacttgtaatgtagctgctaacgcaatcggtccatatggtgcatggggggcaactgctatatcataagcttcagccattgcagcaatttttcttgtttctaaaatccctccacataaagctacatctggttgaatgatatcaatcgctccctgttgaagaattgatttaaattgccatcttgtatacaaacgttcacccgttgctagtggtacagcaactgcattggctacttcactgaaatgttcttcattctccggcaaaaccacttcttctaagaacattggatgatagggttccagtgcttttgctaaaaccttagccattggtttgtgaacacgaccatgaaaatcgacaccaatgctcaatgtatctccaaaacgttctctaattgaagcaacacgttccactacttcagctactttttcataagaatcaatgtagtgtaattcttctgtcgcgttcattttcacggcggtaaacccacgatctactcgatcttgtgcctgctctactacttcagaaggacgatctccaccaatccaagaatatactttgattttatcacgggctgctccacctagtaattcataaactggaacatttaaggctttccctttaatatcccataaagccatttcaagtccagagacaatcgttccattaataggaccacctcggaaaaatgaacgatgcatttcctgaaacagacgttcaattgcaaatgggttttgaccaactaagaatcgatttcctatctcataagctcctgccacaactgtttcagtcttagttccagaaatcatttcaccccagccttcaataccttcatctgtagatattttgacaaaaatccatcttggttttactttatagactgtaatttttgaaattttcactgtatgccctcctgaatattagaaaatatttgaaataaactcagcaatcttcattaaaatgaaaccaataatgtgtgtacctgcatcttcggtagatatttgtgtcattcctgctggtaattggaatcccccagccaaagctaattgtgtatgtatgccggctaaactagtagcaattaaaagcacacaagctgttataatcgtggtggaaagtattccgcgaataatatttccttttgaaaaggcgaccggccatgcagatagccacattgcttggtaggcaatatctgaaataggtaagagtttgttacctggtaaaatagcagccaacactaaggtaatcggaaccatgataatacccgtagcaatggcacttgaattagcaactgtcaacgcagcatccacacccattgtaaaattgtttcctggaaattttacattcaagaatttcttaacagaattagcaaagggtaataatccttccattaaaatttgcatcattttaggtgttagaaccattgttgcagaagtactcattcccactatcaataccttatcaacaggttcttttgctaataacccaataaccaagccgatgacaaatcccataaacataggctcaccaacaaaaccaaaccgctcttgaattttttcaggacgagcatctaccttatttaatccaggaatgcggtcccacaatttgttaagtagccaagccaagggtgcccaaccaactgagttcgcagtcgggaaattaaccccttctagttcaaagtaatcctctactaacggcgttgtccaatcagcgagtttaaaactaataattgcatcaatcgccccgaagattaccgccaatataatatttttatccgttgcataataaaccaaagcagctacaaaaatatagtgattataactccagaaatcgaccattactgtattggtctttttaaaaatcagcatcaacacattaatacccaaaataataaataccataactgctgctagaggaaaagaccaagtggctgctgcacgagctggccagccgacatccataatacttgtttgaataccccaatttttgaccattaactgaacagatggacctacctgtgaaataaaccaattaataataatatttacacccgcaaaaccaatccccacagtcaacgctgattttagtaatgtatttagcttaattctaaaaaataatcctaaaatcaagataatgataggcatcataatcatcggacccaaacttgagatccagtttaacgcatcaatgacaatattcatttttcaccctcctagtcaagctctttcaatgcttctaacaccaaagattcagatttttcttcattcactccagtaacaaatggtgttccaggtataactttaattcctttggttacattttcttgtaatttccctgtaggaacgataaagtcaacttgatttgattctaaagcacctgcaacttctgaaaattttagttgcaaaattcgaggttctggtaatccatttgtttttgctattttccgaattttattagctgccattgtagatgtaatcattgatgatgcacatgcgacgataattgtttttttactcattgtatttccctccaatttattgattaaatgcagttaaaacttctgttttactctttgcttccataattgcttgtaagaaatcctgattggtaactttactcatcaactccttcaataattgcggttgcttatcgggactatcgaataaaaggtgaataataacattcactgaaaccatttcttcgggatcatccattcgctgaaaatgcaaactatctttaagaacggatactaaaatagcggtaacatttgataactgataatctgtatgtggaattgcgattgagcgttccccaatatatagccccgttggataagttgtttctctcttagtgattgactcgagatatccctcctttaccatgttttccgtcatcagtttctttgtaatcttttgaaagtattcttcttggtttgaaaaactttgatttaacaaaatatttttttcttctaatttaatgagactcatcttcttcacttcctgcttcagctagtttatctaaatatgattgaattgattttcgaatagcttgcccattgcggttttgtatatcagctttttgaaacatgcttgatcctaccccaaagtacacaactcctgcttttttaaaagccgcaatattatcaatcgtcactcctccaactgccattaaaggccgtataccaaaaggaccggccagttgtttaaagtaggttggccctacagtgactgctggaaaaacctttacaatatcggcaccttcatcaaacataacttgaatttccgatggcgtaaaagctgatggcacagttaccaccccacgttctttagccaacgaaaaaattggtgttgaaaatttttttggtcctaataaaaatttcgcaccaccagcaattgcttgatctgcttgtgaaaatgttaaaactgtccctgcaccaatcaataattgttgcccaaattttttgttgccttctgtgatgatacgtgcaaagtcatcattattggttgttacttcaattcctaccgaagtgttcatcgcagccaattcttccatgacaaacatcgcctcttcaaaactatatcctcttaaaatgatggttaattcaggaaaattcgttattgacatattgcttcctccttaaaaaattttttattttttttctcacttcatcttccgtcgtgcaaagaagtatttcttgctgatattcctcgtccttagaaagttgtagtaattggttaatcgcaagtaaataattttccttctttccaattgcaaaaggggaaataaaatggataggcctatttccaggaaaaataattggatcaactgatataagtaacgagcaaccgcccttaattaccccattttctggcgatgaatgtggaatagcaatacgattattaagaaaataataagcctcttcatccgccatttgactcattaaaatagtctgatagttctgattaattacctgctcctttaataaaggctgacaagacaattccatcgcgttctgccaagtaagttgtttcgtagatacaagaataatcccttcagaaacaagcaattccacaaaagatatcttttgtgcctgtttactttgacgatctagatatattagtgaatttgcataattaattaaaaatctctcaatatcagtttgtagactttcttcattttgaacagcagagtaacgcttaataatttcagtaaggttcctagtctctttgctgatattattcgtagaaaaatcaatgagtacacggttccgcaagcggtttttttcttcttcgttcataatcggttgtataatatataatggaatttcacttttcaatggttgattgctaaaaatcaaatcaacatcttcgacaaacttatccatctctctgaccgaagaactagcaacaaactgaatatctggaaaaatttctttcaatgttttcgccattacattggccataatcaatccattgctacatacgacgattgccttttttctaacaggtgtttcgataatagaagaatttaatagctccgaacaaaaataaacagaaatcaaatataattcagtttcaggaatcgtcttacgcaaaaatgcttccaaaggtacaatggattctttaacaaaattaagtaccgcactaacttcatggttttccttaacaatttcagctaaatcatctatttcaaatggtaattcgtagcgaattcgatagattgcaggtcgtaaatgattcatcaatcgattggtcaactcttctttattactaatccgaatagctgatttactttgaaataaggtaatcatctccataattacttgatagattcttgaatctaaaatttcaaactcatttgaaattgtattgaatgataaaaacagaagcgtcaaccattcataatctatagctatctcagcatgttgataatgttgatcaatgcagcttcgaatcatttgaaactcatctaattcctgtaaatcataactaaaatcaatctgtcctttcgtccttcttttaaaactagaaagtgataaacctatcaaataataaagtttggttagtgaattatcagaaaatttcaatttaaaagtttgttcgtaggtgtgaataaaaaaaccaacaaattccctttcttcagaaaagagtgactcaaaacggttaactgttgcatgcctttcaaataaataattgaaaacttctaagagcaatgtatgaagctttgccatgcttgattcaatcatatagccattttggggatcaaatatcaaagtgtagtctggtggcaactctttttttattttagaaaagtcgtttctagccgtatttttactgataccaataaacgccattatttcttgggttgtcacttttttggggttggctagaataaataacagttccgaatatcttcttatctcactataagccaaatcatcgtttatatattcaggaatcgcaccttctttaaaaaccattgcttgattcatgtatatcaaaagtttttgaagatcattggcttcatataaccactcccctgagttacttcgctttatcagactcaatccatgaagggataattcatcattaattttttttatagagtaagttatctgcctagtcgaaaaatgtactaatgatttcaattgttgagagtttgtcacatgtgatcgtacaatggtttctaacagttttaaatcttttgtattcacattcatctacctccctgagttaaatataaccgcttacagtattaattggaatatccaaaatttgtcaaaccttggcttaaatcagacaaatgacaggcacttctttaattttttatcttatgcaccatcagaatggtgtggagtaccactcaattttggaggcttttcatgtataaattacaaacaaccgttcaattggcttttgaagatttcaatcaaccgataggtctcaaaatgaatccgtctaaccgttggattcaaaaagcagagctcattccatgggctgaacttgaaaaagactacgctaaaaattttcgtaaaaaaaaaggaaacgtcgcaaaaccctttcgcatgaccttcggagctctactgattcaaaaggaatatagctatagcgacgaagaaacggtcttacaaattcaagaaaacccgtatttatagttcttcatcggtttgccgggctatcaagatgccaagcctttcgatgctctacaatggtctatttccggaaacgcttggacgaaacaacgttgatagaaatcaatgaaaaaatactcgtcttcgacaagaaaaaagacgataaggacaacgattcttatgacgatttcaattccggaacattgattttggatgccacttgtgctccacaaaacatcaaatatccaaccgatacagaattaatgaatgatacccgtacccatgccgagaaaatcatcgatgttgtttgtgaagggaaaaaactgaaaaagccggttctataatatttggttttgttactcaaactgagtagtgacgccaaatatttttttataacaaaaagacatctggttgtcctataattaaatcggcaaaaacaatcataggaggataaccaaatgtccataactaagaatatcaaatgtacggatgaaaagacaagtcattccatcaaacaaattttgaacatcaaagattcccatattaccttttcaaaagatgccattagtaaagagcgcgttcatggccgtatggccaatgtatttaccggcttattaactggagaagcgcatcgttgcgaatgttgtgggtttgattctgtcatccgtcatgcttatcatgatagttggattcagttgcttccgtatcaagaagtaccaacttatctacacctgtacaaacggttctgttgcaaagttttaaatctactatcaaataaggtagaataatagaaaaagatagcaggaggaatgacgatgaatcattttaaaggaaagcaatttcagcaggatgtgattattgtagccgtgggcaactatcttcgttataaccttagctatcgtgaagttcaagaaatcttatatgatcgtgacattaacgtttctcatacgacgatttatcgttgggtgcaagaatatggcaaactactctatcaaatttggaaaaagaaaaataaaaaatccttttattcatggaaaatggatgaaacgtacatcaaaattaaaggaaaatggcattatttgtatcgagccatcgatgcagatggtttaaccttggatatttggttacgtaaaaaacgggacacacaagcagcctatgcttttcttaagcggttagtgaagcagtttgatgaaccgaaggttgtagtcacagataaagcccctctattacaagtgcctttaagaaactaaaagaatacggcttttatcaagggacagaacatcgtaccattaaatacctgaataatttgattgaacaagaccatcgtccagtaaagagacgcaataaattctatcgaagtttacgcactgcctctaccacgattaaaggcatggaagccattcgaggattatataagaaaacccgaaaagaagtcactctcttcgggttttcggtctgtactgaaatcaaggtattattgggaatcccagcttaaatcatagataccgtaagggattttattctttatttaaaactttgcaacagaaccttatttttcccgtaaaggtaagttgctccaaatgagacgacacaacttgctagcatacaaataaagaatattggccagaattcaaacggaatagacaagaaaccaggaattccactgataccaacagaagttgcaatgacgtgttgtgacgccataaatcctccaattattccagaggtcagaatggaaaccacgaatgggaatttatactttagattaaccccgaacattgctggctcagtgatacccatataagcagacaaaccggcagccagtccaacacctttcaactttttattttggattaagaaattcattgcaatagcagcagaaccttgtgccaaacttgacatgactccaataggccaaatataatctccaccgttcgccatcaattgaatatgaactggtaaaaacgcatgatgcatccctgtcacgactaatggcgcaagaccaataccataagcaaatccgccaataaatggaactttttggaataaccatacaatacctgcgacaatcgtattaccaatagcaattgtaatcggcgctataataataaatgttataacactagtaaaaagaattgcaactggtgcaacaaccaacagttggattgtttcaggcacacgctttttcaagaatagctctgttttagctaacacatagccggaaactagagctggcaatacttgtgcttgtagtcccatcttagagatggacaatccaaagattgtccaatgtggaatatctcccgtggttactgcttgcccgtaattccaggcattcatcaaatctgggtgtacaaagactagacctaacacaatcccaagaagaggatttcctttaaagtattttacagttgaccatgttattaacgcaggcagaaattgaaaggaagtgtttgcgataagatttatcatatcagcgacatcagcaatattaggatatacttcaatgagtgactgctcaaaaaagattcctgggtttgttaataaattattcagtcccatcagtaaaccagctgtaacgatcgctggtaaaatcggcacaaatacatcacccaatattttaactgcacgttgaaaccaattcaaattcaactcagccgctacttttttaacgtcttctttgtttgccccactcagcccagattggcttataacctcttcatagatatctgctactttaggaccgataacaacttgaaactgtccattagcattgaaggtacccttcacatcttccaggttttccaatcctgccttatcaactttagtgtcatctcgcaaggcaaacctcagacgtgtcacacagtgagtcagtgctgcaatattctcttttccaccaacaaagttaatgattgatttagcttcttctttattactcattaattcttacctctatttcttctttattagttaatgcttgagatgaatcattgcctaccatgatccaa

SEQ ID NO: 5 - DNA, 1289 bp, Enterococcus gallinarum
  Enterococcus gallinarum strain MRx0554
ttcaccgcggcgtgctgatccgcgattactagcgattccggcttcatgtaggcgagttgcagcctacaatccgaactgagagaagctttaagagattagcttagcctcgcgacttcgcaactcgttgtacttcccattgtagcacgtgtgtagcccaggtcataaggggcatgatgatttgacgtcatccccaccttcctccggtttgtcaccggcagtctcgctagagtgcccaactaaatgatggcaactaacaataagggttgcgctcgttgcgggacttaacccaacatctcacgacacgagctgacgacaaccatgcaccacctgtcactttgcccccgaaggggaagctctatctctagagtggtcaaaggatgtcaagacctggtaaggttcttcgcgttgcttcgaattaaaccacatgctccaccgcttgtgcgggcccccgtcaattcctttgagtttcaaccttgcggtcgtactccccaggcggagtgcttaatgcgtttgctgcagcactgaagggcggaaaccctccaacacttagcactcatcgtttacggcgtggactaccagggtatctaatcctgttcgctccccacgctttcgagcctcagcgtcagttacagaccagagagccgccttcgccactggtgttcctccatatatctacgcatttcaccgctacacatggaattccactctcctcttctgcactcaagtctcccagtttccaatgaccctccccggttgagccgggggctttcacatcagacttaagaaaccgcctgcgctcgctttacgcccaataaatccggacaacgcttgccacctacgtattaccgcggctgctggcacgtagttagccgtggctttctggttagataccgtcaagggatgaacgttctactctcatccttgttcttctctaacaacagagttttacgatccgaaaaccttcttcactcacgcggcgttgctcggtcagactttcgtccattgccgaagattccctactgctgcctcccgtaggagtctgggccgtgtctcagtcccagtgtggccgatcaccctctcaggtcggctatgcatcgtggccttggtgagccgttacctcaccaactagctaatgcaccgcgggtccatccatcagtgacgcaaaagcgcctttcaactttcttccatgcggaaaatagtgttatacggtattagcacctgtttccaagtgttatccccttctgatgggcaggttacccacgtgttactcacccgttcgccactctttt

SEQ ID NO: 6 - DNA, 15 bp, Artificial Sequence
  Description of Artificial Sequence: Synthetic oligonucleotide
gtggtggtggtggtg
